(19) United States
(12) Patent Application Publication
(10) Pub. No.: US 2004/0157278 A1
(43) Pub. Date: Aug. 12, 2004

(54) Detection methods using TIMP 1

(75) Inventors: Jon H. Astle, Taunton, MA (US); Christopher C. Burgess, Westwood, MA (US); Theodore J. Catino, Attleboro, MA (US); Poornima Dwivedi, Alamo, CA (US); Maryanne Huntress, Attleboro, MA (US); Karen Anne Johnson, Acton, MA (US); Marcia E. Lewis, Cohasset, MA (US); Peter J. Maimonis, Westwood, MA (US); Gary A. Molino, Norfolk, MA (US); Susan H. Myerow, Lexington, MA (US); Arunthathi Thiagalingam, Lexington, MA (US); Lisa Allyn Boardman, Rochester, MN (US); Lawrence J. Burgart, Rochester, MN (US); Stephen N. Thibodeau, Rochester, MN (US); Sheryl Brown-Shimer, Boston, MA (US)

Correspondence Address: PALMER & DODGE, LLP, PAULA CAMPBELL EVANS, 111 HUNTINGTON AVENUE, BOSTON, MA, 02199, US

(73) Assignees: Bayer Corporation; Mayo Foundation for Medical Education & Research

(21) Appl. No.: 10/734,564

(22) Filed: Dec. 12, 2003

Related U.S. Application Data
(60) Provisional application No. 60/491,397, filed on Jul. 31, 2003.
(60) Provisional application No. 60/433,554, filed on Dec. 13, 2002.

(51) Int. Cl. G01N 33/567; G01N 33/574

(52) U.S. Cl. 435/7.23

(57) ABSTRACT

The present invention relates to a method for detecting the presence of colorectal cancer in an individual, wherein colorectal cancer is detected by detecting the presence of Reg1α or TIMP1 nucleic acid or amino acid molecules in a clinical sample obtained from the patient, wherein Reg1α or TIMP1 expression is indicative of the presence of colorectal cancer. The invention further relates to a method for detecting the presence of colorectal cancer in an individual, wherein colorectal cancer is detected by detecting the presence of Reg1α or TIMP1 nucleic acid or amino acid molecules in a clinical sample, in addition to detecting the presence of one or more additional colorectal cancer associated markers.

### RELATED APPLICATIONS

[0001] The present application claims priority to U.S. Patent Application Serial No. 60/433,554, filed Dec. 13, 2002 and U.S. Patent Application Serial No. 60/491,397, filed Jul. 13, 2003.

### BACKGROUND OF THE INVENTION

[0002] Colorectal carcinoma is a malignant neoplastic disease. There is a high incidence of colorectal carcinoma in the Western world, particularly in the United States. Tumors of this type often metastasize through lymphatic and vascular channels. Many patients with colorectal carcinoma eventually die from this disease. In fact, it is estimated that 62,000 persons in the United States alone die of colorectal carcinoma annually.

[0003] However, if diagnosed early, colorectal cancer may be treated effectively by surgical removal of the cancerous tissue. Colorectal cancers originate in the colorectal epithelium and typically are not extensively vascularized (and therefore not invasive) during the early stages of development. Colorectal cancer is thought to result from the clonal expansion of a single mutant cell in the epithelial lining of the colon or rectum. The transition to a highly vascularized, invasive and ultimately metastatic cancer which spreads throughout the body commonly takes ten years or longer. If the cancer is detected prior to invasion, surgical removal of the cancerous tissue is an effective cure. However, colorectal cancer is often detected only upon manifestation of clinical symptoms, such as pain and black tarry stool. Generally, such symptoms are present only when the disease is well established, often after metastasis has occurred, and the prognosis for the patient is poor, even after surgical resection of the cancerous tissue. Early detection of colorectal cancer therefore is important in that detection may significantly reduce its morbidity.

[0004] Invasive diagnostic methods such as endoscopic examination allow for direct visual identification, removal, and biopsy of potentially cancerous growths such as polyps. Endoscopy is expensive, uncomfortable, inherently risky, and therefore not a practical tool for screening populations to identify those with colorectal cancer. Non-invasive analysis of stool samples for characteristics indicative of the presence of colorectal cancer or precancer is a preferred alternative for early diagnosis, but no known diagnostic method is available which reliably achieves this goal. A reliable, non-invasive, and accurate technique for diagnosing colorectal cancer at an early stage would help save many lives.

[0005] Ectopic expression of the pancreatic regenerating gene (RegI) has been identified previously in colorectal tumors, and suggested as a potential marker for colorectal cancer (Zenilman et al., (1997) J. Gastrointest. Surg., 1: 194; Watanabe et al., (1990) J. Biol. Chem., 265: 7432; Birse and Rosen, WO01/12781). At present, there is no reliable method known to those of skill in the art for the rapid and accurate detection of Reg1α in the serum of colorectal cancer patients (Satomura et al., (1995) J. Gastroenterol. 30: 643). There is thus a need in the art for a method of detecting, and/or monitoring colorectal cancer in a patient utilizing the expression of Reg1α in serum.

### SUMMARY OF THE INVENTION

[0006] The present invention is provides a method of detecting, monitoring or determining the therapeutic response of colorectal cancer in an individual as well as compositions, and kits for performing the method. In its most general aspect, the method comprises: obtaining a clinical sample from the individual and detecting the presence of Reg1α or TIMP1 in said sample, wherein the presence of Reg1α or TIMP1 in the sample is indicative of the presence or stage of colorectal cancer in the individual.

[0007] In one embodiment, the step of detecting comprises: contacting said clinical sample with a ligand which is capable of binding to Reg1α or TIMP1 under conditions which permit the ligand to bind to Reg1α or TIMP1; and detecting the binding of the ligand to Reg1α or TIMP1, wherein detection of binding is indicative of the presence of Reg1α or TIMP1 in the sample. The polypeptide ligand may comprise, for example, an antibody, peptide, oligonucleotide, or other molecule that specifically binds Reg1α or TIMP1. In a currently preferred embodiment, the clinical sample comprises serum.

[0008] The present invention further provides a method of detecting, monitoring, or determining the presence of colorectal cancer in an individual comprising: obtaining a clinical sample from said individual; and detecting the presence of Reg1α or TIMP1 and at least one other colorectal cancer associated marker in the sample, wherein the presence of Reg1α or TIMP1 and the at least one other colorectal cancer associated marker is indicative of colorectal cancer in the individual. The colorectal cancer associated marker may comprise, for example, one or more of the nucleic acid sequences of SEQ ID Nos 1, 3, or 5-71, or the amino acid sequences of SEQ ID Nos 2, 4, or 72-138, or derivatives or homologs thereof having substantially the same binding specificity.

[0009] In a preferred embodiment embodiment, the above step of detecting comprises contacting a serum sample with a first ligand which is capable of binding to Reg1α or TIMP1 and a second ligand which is capable of binding to the colorectal cancer associated marker, under conditions which permit the first and second ligands to bind to Reg1α or TIMP1 and the colorectal cancer associated marker, respectively; and detecting the binding of the first ligand to Reg1α or TIMP1 and the second ligand to the colorectal cancer associated marker, wherein detection of binding is indicative of the presence of Reg1α or TIMP1 and the colorectal cancer associated marker in said sample. The polypeptide ligand may comprise, for example, an antibody, peptide, oligonucleotide, or other molecule that specifically binds Reg1α or TIMP1.

[0010] The present invention also provides a method of detecting, monitoring or determining the presence of colorectal cancer in an individual comprising: obtaining a clinical sample from an individual; and detecting the presence of a nucleic acid molecule which encodes Reg1α or TIMP1 in said sample, wherein the presence of the nucleic acid molecule in the sample is indicative of colorectal cancer in the individual.

[0011] The invention still further provides a method of detecting, monitoring or determining the presence of colorectal cancer in an individual comprising: obtaining a clinical sample from an individual; and detecting the presence of a nucleic acid molecule which encodes Reg1α or TIMP1 and at least one other nucleic acid molecule which encodes at least one other colorectal cancer associated marker in the sample, wherein the presence of the nucleic acid sequence encoding Reg1α or TIMP1 and the nucleic acid sequence encoding the at least one other colorectal cancer associated marker is indicative of colorectal cancer in the individual. In a preferred embodiment, the colorectal cancer associated marker is one or more of the nucleic acid sequences of SEQ ID Nos 1, 3, or 5-71, or the amino acid sequences of SEQ ID Nos 2, 4, or 72-138, or derivatives or homologs thereof having substantially the same binding specificity.

### BRIEF DESCRIPTION OF THE DRAWINGS

[0012] FIG. 1 shows the level of Reg1α polypeptide present in serum obtained from normal control patients (n=35), patients diagnosed with inflammatory bowel disease (IBD; n=7), patients diagnosed with cirrhosis (n=7), and patients diagnosed with colorectal cancer (n=63).

[0013] FIG. 2 shows the level of Reg1α polypeptide measured in the colorectal cancer patient group (n=63) differentiated based on cancer severity. The degree of cancer has been established by Dukes'-type staging, and data from patients with Dukes'-type A, B, C, and D is shown.

[0014] FIG. 3 shows a graphical representation of the plasma level of TIMP1 polypeptides, along with one or more other colorectal cancer associated markers obtained from patients with colorectal cancer.

### DETAILED DESCRIPTION

[0015] The present invention is based, in part, on the discovery that the expression of they human islet regenerating protein, Reg1α, is increased in patients with colorectal cancer, and as such is a valuable marker for the identification of colorectal cancer in humans. The present invention further provides for the early detection of colorectal cancer by detecting the presence of Reg1α or TIMP1 (and optionally, one or more additional colorectal cancer associated markers) in a clinical sample from an individual. The invention provides further, the ability to monitor the recurrence of colorectal cancer in a patient wherein colorectal cancer has been previously detected, by monitoring the levels of Reg1α or TIMP1 polypeptide or polynucleotide sequences present in a clinical sample from the patient, wherein an increase in Reg1α or TIMP1 in the sample is indicative of the recurrence of colorectal cancer. The invention provides still further, the ability to monitor the decrease in colorectal cancer in response to a therapeutic agent, whereby the levels of Reg1α or TIMP1 are measured in a clinical sample obtained from a patient who has received therapeutic treatment for colorectal cancer, wherein a decrease in the levels of Reg1α or TIMP1 detected in the clinical sample from the patient is indicative of the efficacy of the therapeutic treatment. In any of the preceding embodiments, Reg1α or TIMP1 polynucleotide or polypeptide expression levels are measured in concert with at least one additional colorectal cancer associated marker.

[0016] Accordingly, the present invention relates in part to novel methods for identifying cancer in an individual, particularly colorectal cancer, by screening for genes or gene products, which are over or underexpressed in cancer relative to the level of expression in normal tissue, such as colon tissue. Alternatively, the invention provides a method for the identification of cancer in an individual by screening for genes or gene products which are over- or underexpressed in colorectal cancer, and which are detectable in a clinical sample of an individual with colorectal cancer.

[0017] In a preferred embodiment, the present invention relates to methods useful for the detection of colorectal cancer in an individual, preferably a human patient by detecting serum levels of Reg1α or TIMP1. The invention relates to methods for colorectal cancer detection that utilize either or both techniques of detecting the presence of the Reg1α or TIMP1 gene or detecting the Reg1α or TIMP1 encoded polypeptide product in the serum of an individual, or alternatively in a clinical sample from an individual.

[0018] The present invention further provides methods for the identification of colorectal cancer wherein cancer is detected by the identification of Reg1α or TIMP1 expression in a patient clinical sample, in combination with the expression in the same sample of at least one other colorectal cancer associated marker. This combination of Reg1α or TIMP1 detection analysis, in concert with the detection of additional colon-cancer markers provides an efficient and reliable method for detecting the presence of colorectal cancer.

[0019] The methods described herein which specifically refer to the detection of Reg1α, may equally be applied to the detection of TIMP1 by one of skill in the art, based on the disclosure of the present specification.

[0020] Definitions

[0021] As used herein, “Reg1α” refers to a polypeptide molecule having the sequence of either of SEQ ID Nos 2 or 4. Reg1α as used herein, also refers to a polypeptide which is encoded by either of the sequences of SEQ ID Nos. 1 or 3. The sequences of SEQ ID Nos 2 and 4 each represent a functional Reg1α protein, but differ from each other by four amino acids in the leader sequence which is cleaved off during protein synthesis.

[0022] As used herein, “TIMP1” refers to a polypeptide molecule having the sequence of SEQ ID NO: 100. TIMP1 as used herein, also refers to a nucleotide which is encoded by the sequence of SEQ ID NO: 33, or a functional homolog thereof.

[0023] As used herein, a “clinical sample” refers to a tissue, cellular, or fluid sample obtained from an individual. A “clinical sample”, as used herein, can refer to a cells, circulating cells (e.g., circulating cells in blood), cells obtained from specific anatomical locations, or specific cell types (e.g., colon cell, gastrointestinal cell, cancerous cell, etc.), a tissue sample, or physiological fluids such as lymph, bile, serum, plasma, urine, synovial fluid, blood, CSF, mucus membrane secretions, or other physiological samples such as stool. Preferably, the clinical sample is serum or plasma. A colorectal cancer associated marker of the invention, such as TIMP1, may be detected in a suitable “clinical sample” where the suitability of a particular type of clinical sample for the detection of a specific colorectal cancer associated marker may be readily determined by one of skill in the art.

[0024] As used herein, “detecting” refers to the identification of the presence or absence of a molecule in a sample. Where the molecule to be detected is a polypeptide, the step of detecting can be performed by binding the polypeptide with an antibody that is detectably labeled. A detectable label is a molecule which is capable of generating, either independently, or in response to a stimulus, an observable signal. A detectable label can be, but is not limited to a fluorescent label, a chromogenic label, a luminescent label, or a radioactive label. Methods for “detecting” a label include quantitative and qualitative methods adapted for standard or confocal microscopy, FACS analysis, and those adapted for high throughput methods involving multiwell plates, arrays or microarrays. One of skill in the art can select appropriate filter sets and excitation energy sources for the detection of fluorescent emission from a given fluorescent polypeptide or dye. “Detecting” as used herein can also include the use of multiple antibodies to a polypeptide to be detected, wherein the multiple antibodies bind to different epitopes on the polypeptide to be detected. Antibodies used in this manner can employ two or more detectable labels, and can include, for example a FRET pair. A polypeptide molecule, such as Reg1α, is “detected” according to the present invention when the level of detectable signal is at all greater than the background level of the detectable label, or where the level of measured nucleic acid is at all greater than the level measured in a control sample.

[0025] As used herein, “detecting” as it refers to detecting the presence of a target nucleic acid molecule (e.g., a nucleic acid molecule encoding Reg1α, or other colorectal cancer-specific sequence) refers to a process wherein the signal generated by a directly or indirectly labeled probe nucleic acid molecule (capable of hybridizing to a target, e.g., a sequence encoding Reg1α, in a serum sample) is measured or observed. Thus, detection of the probe nucleic acid is directly indicative of the presence, and thus the detection, of a target nucleic acid, such as a sequence encoding Reg1α. For example, if the detectable label is a fluorescent label, the target nucleic acid (e.g., the nucleic acid molecule encoding Reg1α) is “detected” by observing or measuring the light emitted by the fluorescent label on the probe nucleic acid when it is excited by the appropriate wavelength, or if the detectable label is a fluorescence/quencher pair, the target nucleic acid is “detected” by observing or measuring the light emitted upon association or dissociation of the fluorescence/quencher pair present on the probe nucleic acid, wherein detection of the probe nucleic acid indicates detection of the target nucleic acid. If the detectable label is a radioactive label, the target nucleic acid, following hybridization with a radioactively labeled probe is “detected” by, for example, autoradiography. Methods and techniques for “detecting” fluorescent, radioactive, and other chemical labels may be found in Ausubel et al. (1995, Short Protocols in Molecular Biology, 3^{rd} Ed. John Wiley and Sons, Inc.). Alternatively, a nucleic acid may be “indirectly detected” wherein a moiety is attached to a probe nucleic acid which will hybridize with the target, such as an enzyme activity, allowing detection in the presence of an appropriate substrate, or a specific antigen or other marker allowing detection by addition of an antibody or other specific indicator. Alternatively, a target nucleic acid molecule can be detected by amplifying a nucleic acid sample prepared from a patient clinical sample, using oligonucleotide primers which are specifically designed to hybridize with a portion of the target nucleic acid sequence. Quantative amplification methods, such as, but not limited to TaqMan, may also be used to “detect” a target nucleic acid according to the invention. A nucleic acid molecule is “detected” as used herein where the level of nucleic acid measured (such as by quantitative PCR), or the level of detectable signal provided by the detectable label is at all above the background level.

[0026] As used herein, “detecting” refers further to the early detection of colorectal cancer in a patient, wherein “early” detection refers to the detection of colorectal cancer at Dukes stage A or preferably, prior to a time when the colorectal cancer is morphologically able to be classified in a particular Dukes stage. “Detecting” as used herein further refers to the detection of colorectal cancer recurrence in an individual, using the same detection criteria as indicated above. “Detecting” as used herein still further refers to the measuring of a change in the degree of colorectal cancer before and/or after treatment with a therapeutic agent. In this case, a change in the degree of colorectal cancer in response to a therapeutic agent refers to an increase or decrease in the expression of Reg1α (and optionally, one or more additional colorectal cancer associated markers), or alternatively, in the amount of Reg1α polypeptide (and optionally, one or more additional colorectal cancer associated markers) present in a clinical sample by at least 10% in response to the presence of a therapeutic agent relative to the expression level in the absence of the therapeutic agent.

[0027] As used herein, “individual” refers to a mammal, preferably a human.

[0028] As used herein, a “ligand” refers to a molecule which is capable of binding a polypeptide. A “polypeptide ligand” useful in the present invention includes, but is not limited to an antibody, a monoclonal antibody, a polyclonal antibody, an antibody fragment (e.g., Fv, scFV, or Fab), a small molecule, or a nucleic acid aptamer. A “ligand” as used herein can also refer to a “nucleic acid ligand”, such as an oligonucleotide, polynucleotide, DNA, RNA, mRNA, or cDNA, which is capable of binding to a complementary nucleic acid molecule, or polypeptide molecule.

[0029] The term “antibody” as used herein is intended to include whole antibodies, e.g., of any isotype (IgG, IgA, IgM, IgE, etc), and includes fragments thereof, and single-chain antibodies, which also are specifically reactive with a vertebrate, e.g., mammalian, protein. Antibodies can be fragmented using conventional techniques and the fragments screened for utility in the same manner as described above for whole antibodies. Thus, the term includes segments of proteolytically-cleaved or recombinantly-prepared portions of an antibody molecule that are capable of selectively reacting with a certain protein. Nonlimiting examples of such proteolytic and/or recombinant fragments include Fab, F(ab′)₂, Fab′, Fv, and single chain antibodies (scFv) containing a V[L] and/or V[H] domain joined by a peptide linker. The scFv's may be covalently or non-covalently linked to form antibodies having two or more binding sites. The subject invention includes polyclonal, monoclonal, or other purified preparations of antibodies and recombinant antibodies.

[0030] As used herein, a “colorectal cancer associated marker” refers to a polypeptide or nucleic acid sequence which exhibits over- or underexpression of at least 10% in colorectal cancer cells, tissue, or serum obtained from an individual having colorectal cancer, relative to the level of expression in cells, tissue, or serum obtained from an individual that does not have colorectal cancer. Non-limiting examples of colorectal cancer associated markers useful in the present invention include the nucleic acid molecules of SEQ ID Nos 1, 3, 5-71, and/or the polypeptide molecules of SEQ ID Nos 2, 4, 72-138. In one embodiment, the polypeptide sequences of SEQ ID Nos 2, 4, 72-138 are encoded by the nucleic acid sequences of 1, 3, 5-71, respectively. A “colorectal cancer specific marker” useful in the invention may be a polypeptide or nucleic acid sequence which exhibits over- or underexpression in colorectal cancer as described above, but which may also be over or underexpressed in other, non-colorectal types of cancer. Alternatively, a “colorectal cancer associated marker”, as used herein, may refer to a carbohydrate epitope present on a polypeptide or nucleic acid molecule and/or an antibody molecule which recognizes and is capable of binding to such an epitope, wherein the carbohydrate epitope is known to be associated with the presence of colorectal cancer in an individual. Such carbohydrate epitopes may be present on more than one unrelated protein or polypeptide. In one embodiment, such a carbohydrate epitope is CA 19-9, also known as sialyl-Lewis^{a}, is a tumor marker defined by a monoclonal antibody as a carbohydrate epitope, related to the blood group antigens, composed of a branching, 5-sugar structure covalently bound to a variety of glycoproteins or glycolipids. The proteins primarily belong to the mucin family and the lipids are usually membrane associated. The CA 19-9 epitope is typically the terminal moiety of a complex, O-linked carbohydrate structure on either macromolecule. Other tumor markers also defined as various carbohydrate epitopes useful in the present invention as a “colorectal cancer associated marker” include CA 72-4, TF, sTn, Tn, CA 50, CA 549, CA 242, LASA, and the Du-PAN's 1-5.

[0031] The term “interact” as used herein is meant to include detectable interactions (e.g., biochemical interactions) between molecules, such as interaction between protein-protein, protein-nucleic acid, nucleic acid-nucleic acid, and protein-small molecule or nucleic acid-small molecule in nature.

[0032] As used herein, the term “nucleic acid” refers to polynucleotides such as deoxyribonucleic acid (DNA), and, where appropriate, ribonucleic acid (RNA). The term should also be understood to include, as equivalents, analogs of either RNA or DNA made from nucleotide analogs, and, as applicable to the embodiment being described, single (sense or antisense) and double-stranded polynucleotides. ESTs, chromosomes, cDNAs, mRNAs, and rRNAs are representative examples of molecules that may be referred to as nucleic acids.

[0033] The terms “protein”, “polypeptide”, and “peptide” are used interchangeably herein when referring to a gene product. As used herein, “polypeptide” refers to any kind of polypeptide such as peptides, human proteins, fragments of human proteins, proteins or fragments of proteins from non-human sources, engineered versions proteins or fragments of proteins, enzymes, antigens, drugs, molecules involved in cell signaling, such as receptor molecules, antibodies, including polypeptides of the immunoglobulin superfamily, such as antibody polypeptides or T-cell receptor polypeptides.

[0034] As used herein, the term “level of expression” refers to the measurable expression level of a given nucleic acid. The level of expression of a nucleic acid is determined by methods well known in the art. The “level of expression” may measured by hybridization analysis using labeled target nucleic acids according to methods well known in the art (see, for example, Ausubel et al., Short Protocols in Molecular Biology, 3^{rd} Ed. 1995, John Wiley and Sons, Inc.). The label on the target nucleic acid is a luminescent label, an enzymatic label, a radioactive label, a chemical label or a physical label. Preferably, the target nucleic acids are labeled with a fluorescent molecule. Preferred fluorescent labels include fluorescein, amino coumarin acetic acid, tetramethylrhodamine isothiocyanate (TRITC), Texas Red, Cy3 and Cy5. Alternatively, the “level of expression” can be measured by quantitative amplification protocols, such as TaqMan, known to those of skill in the art.

[0035] The term “vector” refers to a nucleic acid molecule capable of transporting another nucleic acid to which it has been linked. One type of preferred vector is an episome, i.e., a nucleic acid capable of extra-chromosomal replication. Preferred vectors are those capable of autonomous replication and/or expression of nucleic acids to which they are linked. Vectors capable of directing the expression of genes to which they are operatively linked are referred to herein as “expression vectors”. In general, expression vectors of utility in recombinant DNA techniques are often in the form of “plasmids” which refer generally to circular double stranded DNA loops which, in their vector form are not bound to the chromosome. In the present specification, “plasmid” and “vector” are used interchangeably as the plasmid is the most commonly used form of vector. However, the invention is intended to include such other forms of expression vectors which serve equivalent functions and which become known in the art subsequently hereto.

[0036] Reg1α and TIMP1 Nucleic Acid

[0037] As described above, the present invention relates to the detection of Reg1α or TIMP1 polypeptide in a clinical sample from an individual, preferably a serum or plasma sample, thus permitting the detection of colorectal cancer. The present invention, however, equally relates to the identification of the nucleic acid sequence which encodes Reg1α or TIMP1 as a marker for colorectal cancer.

[0038] Nucleic acid and amino acid sequences of Reg1α are shown in SEQ ID Nos 1 or 3, and 2 or 4, respectively. Nucleic acid and amino acid sequences of TIMP1 are shown in SEQ ID NO: 33 and 100 respectively. While the invention relates to the direct detection of either of the sequences of Reg1α or TIMP1 in a method for detecting colorectal cancer, the invention further relates to the detection of sequences complementary thereto, or a sequence which specifically hybridizes to a sequence of SEQ ID Nos. 1, 3, or 33. The present invention also relates to the detection of colorectal cancer by detecting the presence, in a clinical sample, of a nucleic acid molecule which encodes the sequence of SEQ ID Nos. 2, 4, or 100, or a fragment thereof.

[0039] Another aspect of the invention provides the detection of colorectal cancer by the detection of a nucleic acid which hybridizes under low, medium, or high stringency conditions to a nucleic acid sequence represented by one or more of SEQ ID Nos. 1, 3, or 33, or a sequence complementary thereto. Appropriate stringency conditions which promote DNA hybridization, for example, 6.0× sodium chloride/sodium citrate (SSC) at about 45° C., followed by a wash of 2.0×SSC at 50° C., are known to those skilled in the art or can be found in Current Protocols in Molecular Biology, John Wiley & Sons, N.Y. (1989), 6.3.1-12.3.6. For example, the salt concentration in the wash step can be selected from a low stringency of about 2.0×SSC at 50° C. to a high stringency of about 0.2×SSC at 50° C. In addition, the temperature in the wash step can be increased from low stringency conditions at room temperature, about 22° C., to high stringency conditions at about 65° C. Both temperature and salt may be varied, or temperature or salt concentration may be held constant while the other variable is changed. In a preferred embodiment, a nucleic acid encoding Reg1α or TIMP1 will bind to SEQ ID Nos. 1, 3 or 33, or a sequence complementary thereto, or a fragment thereof, under moderately stringent conditions, for example at about 2.0×SSC and about 40° C. In a particularly preferred embodiment, a Reg1α or TIMP1 nucleic acid sequence present in a patient clinical sample will bind of SEQ ID Nos. 1, 3, or 33, respectively, or a sequence complementary thereto, or fragment thereof, under high stringency conditions.

[0040] In one embodiment, the invention provides nucleic acids which hybridize under low stringency conditions of 6×SSC at room temperature followed by a wash at 2×SSC at room temperature.

[0041] In another embodiment, the invention provides nucleic acids which hybridize under high stringency conditions of 2×SSC at about 65° C. followed by a wash at 0.2×SSC at about 65° C.

[0042] Detection of Reg1α nucleic acids having a sequence that differs from the nucleotide sequences shown in SEQ ID Nos. 1 or 3, or a sequence complementary thereto, due to degeneracy in the genetic code, are also within the scope of the invention. Such nucleic acids encode functionally equivalent peptides (i.e., a peptide having equivalent or similar biological activity) but differ in sequence from the sequence shown in the sequence listing due to degeneracy in the genetic code. For example, a number of amino acids are designated by more than one triplet. Codons that specify the same amino acid, or synonyms (for example, CAU and CAC each encode histidine) may result in “silent” mutations which do not affect the amino acid sequence of a polypeptide. However, it is expected that DNA sequence polymorphisms that do lead to changes in the amino acid sequences of the subject polypeptides will exist among mammals. One skilled in the art will appreciate that these variations in one or more nucleotides (e.g., up to about 3-5% of the nucleotides) of the nucleic acids encoding polypeptides having an activity of a polypeptide may exist among individuals of a given species due to natural allelic variation.

[0043] The invention also includes within its scope a polynucleotide which hybridizes under stringent conditions (at least about 4×SSC at 65° C., or at least about 4×SSC at 42° C.; see, for example, U.S. Pat. No. 5,707,829, incorporated herein by reference) with at least 15 contiguous nucleotides of SEQ ID Nos. 1 or 3. By this is intended that when at least 15 contiguous nucleotides of SEQ ID Nos. 1 or 3 is used as a probe, the probe will preferentially hybridize with a gene or mRNA (of the biological material) comprising the complementary sequence, allowing the identification and retrieval of the nucleic acids (i.e., Reg1α) of the biological material that uniquely hybridize to the selected probe. Probes of more than 15 nucleotides can be used, but 15 nucleotides represents enough sequence for unique identification.

[0044] Constructs of polynucleotides having the sequence of SEQ ID Nos. 1 or 3, a portion thereof, or a sequence complementary thereto, and useful, for example for generating a probe, can be produced synthetically, or obtained from natural sources (e.g., human cells) using methods well known to those of skill in the art (see, for example, Sambrook et al., Molecular Cloning: A Laboratory Manual, 2nd Ed. (Cold Spring Harbor Press, Cold Spring Harbor, N.Y. 1989).

[0045] Calculation of Sequence Homology

[0046] In one embodiment, the present invention relates to the detection of colorectal cancer in an individual by detecting the presence of Reg1α or TIMP1 or a sequence homologous thereto, by using probes and/or primers which are complementary to portions of the Reg1α a or TIMP1 sequence, or are sufficiently homologous to portions of the Reg1α or TIMP1 sequence to permit hybridization of the probes and/or primers to Reg1α or TIMP1 under high stringency conditions. Sequences of the invention are at least 50% homologous to Reg1α or TIMP1, and are preferably 60%, 70%, 80%, 90% homologous up to complete sequence identity with Reg1α or TIMP1 (or optionally to a sequence encoding one or more additional colorectal cancer associated markers).

[0047] Sequence identity with respect to any of the sequences presented herein can be determined by a simple “eyeball” comparison (i.e. a strict comparison) of any one or more of the sequences with another sequence to see if that other sequence has, for example, at least 80% sequence identity to the sequence(s).

[0048] Relative sequence identity can also be determined by commercially available computer programs that can calculate % identity between two or more sequences using any suitable algorithm for determining identity, using for example default parameters. A typical example of such a computer program is CLUSTAL. Other computer program methods to determine identity and similarity between two sequences include but are not limited to the GCG program package (Devereux et al 1984 Nucleic Acids Research 12: 387) and FASTA (Atschul et al 1990 J Molec Biol 403-410).

[0049] % homology may be calculated over contiguous sequences, i.e. one sequence is aligned with the other sequence and each amino acid in one sequence is directly compared with the corresponding amino acid in the other sequence, one residue at a time. This is called an “ungapped” alignment. Typically, such ungapped alignments are performed only over a relatively short number of residues.

[0050] Although this is a very simple and consistent method, it fails to take into consideration that, for example, in an otherwise identical pair of sequences, one insertion or deletion will cause the following amino acid residues to be put out of alignment, thus potentially resulting in a large reduction in % homology when a global alignment is performed. Consequently, most sequence comparison methods are designed to produce optimal alignments that take into consideration possible insertions and deletions without penalising unduly the overall homology score. This is achieved by inserting “gaps” in the sequence alignment to try to maximise local homology.

[0051] However, these more complex methods assign “gap penalties” to each gap that occurs in the alignment so that, for the same number of identical amino acids, a sequence alignment with as few gaps as possible—reflecting higher relatedness between the two compared sequences—will achieve a higher score than one with many gaps. “Affine gap costs” are typically used that charge a relatively high cost for the existence of a gap and a smaller penalty for each subsequent residue in the gap. This is the most commonly used gap scoring system. High gap penalties will of course produce optimized alignments with fewer gaps. Most alignment programs allow the gap penalties to be modified. However, it is preferred to use the default values when using such software for sequence comparisons. For example, when using the GCG Wisconsin Bestfit package the default gap penalty for amino acid sequences is −12 for a gap and −4 for each extension.

[0052] Calculation of maximum % homology therefore firstly requires the production of an optimal alignment, taking into consideration gap penalties. A suitable computer program for carrying out such an alignment is the GCG Wisconsin Bestfit package (University of Wisconsin, U.S.A.; Devereux et al., 1984, Nucleic Acids Research 12:387). Examples of other software that can perform sequence comparisons include, but are not limited to, the BLAST package (Ausubel et al., 1995, Short Protocols in Molecular Biology, 3rd Edition, John Wiley & Sons), FASTA (Atschul et al., 1990, J. Mol. Biol., 403-410) and the GENEWORKS suite of comparison tools. Both BLAST and FASTA are available for offline and online searching (Ausubel et al., 1999 supra, pages 7-58 to 7-60).

[0053] Although the final % homology can be measured in terms of identity, the alignment process itself is typically not based on an all-or-nothing pair comparison. Instead, a scaled similarity score matrix is generally used that assigns scores to each pairwise comparison based on chemical similarity or evolutionary distance. An example of such a matrix commonly used is the BLOSUM62 matrix—the default matrix for the BLAST suite of programs. GCG Wisconsin programs generally use either the public default values or a custom symbol comparison table if supplied. It is preferred to use the public default values for the GCG package, or in the case of other software, the default matrix, such as BLOSUM62.

[0054] Advantageously, the BLAST algorithm is employed, with parameters set to default values. The BLAST algorithm is described in detail on the World Wide Web at ncbi.nih.gov/BLAST/blast_help.html, which is incorporated herein by reference. The search parameters are defined as follows, and can be advantageously set to the defined default parameters.

[0055] Advantageously, “substantial identity” when assessed by BLAST equates to sequences which match with an EXPECT value of at least about 7, preferably at least about 9 and most preferably 10 or more. The default threshold for EXPECT in BLAST searching is usually 10.

[0056] BLAST (Basic Local Alignment Search Tool) is the heuristic search algorithm employed by the programs blastp, blastn, blastx, tblastn, and tblastx; these programs ascribe significance to their findings using the statistical methods of Karlin and Altschul (Karlin and Altschul 1990, Proc. Natl. Acad. Sci. USA 87:2264-68; Karlin and Altschul, 1993, Proc. Natl. Acad. Sci. USA 90:5873-7; see http://www.ncbi.nih.gov/BLAST/blast_help.html) with a few enhancements. The BLAST programs are tailored for sequence similarity searching, for example to identify homologues to a query sequence. For a discussion of basic issues in similarity searching of sequence databases, see Altschul et al (1994) Nature Genetics 6:119-129.

[0057] The five BLAST programs available on the World Wide Web at ncbi.nlm.nih.gov perform the following tasks: blastp—compares an amino acid query sequence against a protein sequence database; blastn—compares a nucleotide query sequence against a nucleotide sequence database; blastx—compares the six-frame conceptual translation products of a nucleotide query sequence (both strands) against a protein sequence database; tblastn—compares a protein query sequence against a nucleotide sequence database dynamically translated in all six reading frames (both strands); tblastx—compares the six-frame translations of a nucleotide query sequence against the six-frame translations of a nucleotide sequence database.

[0058] BLAST uses the following search parameters:

[0059] HISTOGRAM—Display a histogram of scores for each search; default is yes. (See parameter H in the BLAST Manual).

[0060] DESCRIPTIONS—Restricts the number of short descriptions of matching sequences reported to the number specified; default limit is 100 descriptions. (See parameter V in the manual page).

[0061] EXPECT—The statistical significance threshold for reporting matches against database sequences; the default value is 10, such that 10 matches are expected to be found merely by chance, according to the stochastic model of Karlin and Altschul (1990). If the statistical significance ascribed to a match is greater than the EXPECT threshold, the match will not be reported. Lower EXPECT thresholds are more stringent, leading to fewer chance matches being reported. Fractional values are acceptable. (See parameter E in the BLAST Manual).

[0062] CUTOFF—Cutoff score for reporting high-scoring segment pairs. The default value is calculated from the EXPECT value (see above). HSPs are reported for a database sequence only if the statistical significance ascribed to them is at least as high as would be ascribed to a lone HSP having a score equal to the CUTOFF value. Higher CUTOFF values are more stringent, leading to fewer chance matches being reported. (See parameter S in the BLAST Manual). Typically, significance thresholds can be more intuitively managed using EXPECT.

[0063] ALIGNMENTS—Restricts database sequences to the number specified for which high-scoring segment pairs (HSPs) are reported; the default limit is 50. If more database sequences than this happen to satisfy the statistical significance threshold for reporting (see EXPECT and CUTOFF below), only the matches ascribed the greatest statistical significance are reported. (See parameter B in the BLAST Manual).

[0064] MATRIX—Specify an alternate scoring matrix for BLASTP, BLASTX, TBLASTN and TBLASTX. The default matrix is BLOSUM62 (Henikoff & Henikoff, 1992). The valid alternative choices include: PAM40, PAM120, PAM250 and IDENTITY. No alternate scoring matrices are available for BLASTN; specifying the MATRIX directive in BLASTN requests returns an error response.

[0065] STRAND—Restrict a TBLASTN search to just the top or bottom strand of the database sequences; or restrict a BLASTN, BLASTX or TBLASTX search to just reading frames on the top or bottom strand of the query sequence.

[0066] FILTER—Mask off segments of the query sequence that have low compositional complexity, as determined by the SEG program of Wootton & Federhen (1993) Computers and Chemistry 17:149-163, or segments consisting of short-periodicity internal repeats, as determined by the XNU program of Clayerie & States (1993) Computers and Chemistry 17:191-201, or, for BLASTN, by the DUST program of Tatusov and Lipman (see http://www.ncbi.nlm.nih.gov). Filtering can eliminate statistically significant but biologically uninteresting reports from the blast output (e.g., hits against common acidic-, basic- or proline-rich regions), leaving the more biologically interesting regions of the query sequence available for specific matching against database sequences.

[0067] Low complexity sequence found by a filter program is substituted using the letter “N” in nucleotide sequence (e.g., “NNNNNNNNNNNNN”) and the letter “X” in protein sequences (e.g., “XXXXXXXXX”).

[0068] Filtering is only applied to the query sequence (or its translation products), not to database sequences. Default filtering is DUST for BLASTN, SEG for other programs.

[0069] It is not unusual for nothing at all to be masked by SEG, XNU, or both, when applied to sequences in SWISS-PROT, so filtering should not be expected to always yield an effect. Furthermore, in some cases, sequences are masked in their entirety, indicating that the statistical significance of any matches reported against the unfiltered query sequence should be suspect.

[0070] NCBI-gi—Causes NCBI gi identifiers to be shown in the output, in addition to the accession and/or locus name.

[0071] Most preferably, sequence comparisons are conducted using the simple BLAST search algorithm provided on the World Wide Web at ncbi.nlm.nih.gov/BLAST. In some embodiments of the present invention, no gap penalties are used when determining sequence identity.

[0072] Probes and Primers

[0073] The nucleotide sequence of Reg1α or TIMP1 is useful in the present invention for the generation of probes and primers designed for identifying the Reg1α or TIMP1 nucleic acid sequence in a patient sample such as serum, colon cells or tissue. Nucleotide sequences useful as probes/primers may include all or a portion of SEQ ID Nos. 1, 3 or 33, or a sequence complementary thereto, or sequences which hybridize under stringent conditions to all or a portion of SEQ ID No. 1, 3 or 33. For instance, the present invention also provides a probe/primer comprising a substantially purified oligonucleotide, which oligonucleotide comprising a nucleotide sequence that hybridizes under stringent conditions to at least approximately 8, preferably about 12, preferably about 15, preferably about 25, more preferably about 40 consecutive nucleotides up to the full length of the sense or anti-sense sequence of SEQ ID Nos. 1, 3 or 33, or a sequence complementary thereto, or a naturally occurring mutant thereof. For instance, primers based on the nucleic acid represented in SEQ ID No. 1, 3 or 33, or a sequence complementary thereto, can be used in a reaction to amplify a template nucleic acid (e.g., Reg1α) contained within an mRNA sample derived from a patient clinical sample.

[0074] Not only are probes based on the nucleic acid sequence encoding Reg1α or TIMP1 useful for detecting Reg1α or TIMP1, but they can also provide a method for detecting mutations in wild-type Reg1α or TIMP1 in a patient. Nucleic acid probes which are complementary to a wild-type Reg1α or TIMP1 and can form mismatches with mutant genes are provided, allowing for detection by enzymatic or chemical cleavage or by shifts in electrophoretic mobility. Likewise, probes based on the subject sequences can be used to detect transcripts or genomic sequences encoding the same or homologous proteins, for use, for example, in prognostic or diagnostic assays. In preferred embodiments, the nucleic acid probe further comprises a label group attached thereto and able to be detected, e.g., the label group is selected from a radioisotope, a fluorescent compound, a chemiluminescent compound, a chromagenic compound, an enzyme, and enzyme co-factor.

[0075] Full-length cDNA molecules comprising the disclosed nucleic acids, useful for the generation of probes, primers, or for transcription to produce the Reg1α or TIMP1 protein itself, or antibodies thereto may be obtained as follows. The nucleic acid sequence of Reg1α or TIMP1 or a portion thereof comprising at least approximately 8, preferably about 12, preferably about 15, preferably about 25, more preferably about 40 nucleotides up to the full length of the sequence of SEQ ID Nos. 1, 3 or 33, or a sequence complementary thereto, may be used as a hybridization probe to detect hybridizing members of a cDNA library using probe design methods, cloning methods, and clone selection techniques as described in U.S. Pat. No. 5,654,173, “Secreted Proteins and Polynucleotides Encoding Them,” incorporated herein by reference. Libraries of cDNA may be made from selected tissues, such as normal or tumor tissue, or from tissues of a mammal treated with, for example, a pharmaceutical agent. Preferably, the tissue is the same as that used to generate the nucleic acids, as both the nucleic acid and the cDNA represent expressed genes. Alternatively, many cDNA libraries are available commercially. (Sambrook et al., Molecular Cloning: A Laboratory Manual, 2nd Ed. (Cold Spring Harbor Press, Cold Spring Harbor, N.Y. 1989). The choice of cell type for library construction may be made after the identity of the protein encoded by the nucleic acid-related gene is known. This will indicate which tissue and cell types are likely to express the related gene, thereby containing the mRNA for generating the cDNA.

[0076] Members of the library that are larger than the nucleic acid, and preferably that contain the whole sequence of the native message, may be obtained. To confirm that the entire cDNA has been obtained, RNA protection experiments may be performed as follows. Hybridization of a full-length cDNA to an mRNA may protect the RNA from RNase degradation. If the cDNA is not fill length, then the portions of the mRNA that arc not hybridized may be subject to RNase degradation. This may be assayed, as is known in the art, by changes in electrophoretic mobility on polyacrylamide gels, or by detection of released monoribonucleotides. Sambrook et al., Molecular Cloning: A Laboratory Manual, 2nd Ed. (Cold Spring Harbor Press, Cold Spring Harbor, N.Y. 1989). In order to obtain additional sequences 5′ to the end of a partial cDNA, 5′ RACE (PCR Protocols: A Guide to Methods and Applications (Academic Press, Inc. 1990)) may be performed.

[0077] Genomic DNA (e.g., Reg1α genomic DNA) may be isolated using nucleic acids in a manner similar to the isolation of full-length cDNAs. Briefly, the nucleic acids, or portions thereof, may be used as probes to libraries of genomic DNA. Preferably, the library is obtained from the cell type that was used to generate the nucleic acids. Most preferably, the genomic DNA is obtained from the biological material described herein in the Example. Such libraries may be in vectors suitable for carrying large segments of a genome, such as P1 or YAC, as described in detail in Sambrook et al., pages 9.4-9.30. In addition, genomic sequences can be isolated from human BAC libraries, which are commercially available from Research Genetics, Inc., Huntville, Ala., USA, for example. In order to obtain additional 5′ or 3′ sequences, chromosome walking may be performed, as described in Sambrook et al., such that adjacent and overlapping fragments of genomic DNA are isolated. These may be mapped and pieced together, as is known in the art, using restriction digestion enzymes and DNA ligase.

[0078] Using the nucleic acids of the invention, corresponding full length genes can be isolated using both classical and PCR methods to construct and probe cDNA libraries. Using either method, Northern blots, preferably, may be performed on a number of cell types to determine which cell lines express the gene of interest at the highest rate.

[0079] Classical methods of constructing cDNA libraries in Sambrook et al., supra. With these methods, cDNA can be produced from mRNA and inserted into viral or expression vectors. Typically, libraries of mRNA comprising poly(A) tails can be produced with poly(T) primers. Similarly, cDNA libraries can be produced using the instant Reg1α sequence or portions thereof as primers.

[0080] PCR methods may be used to amplify the members of a cDNA library that comprise the desired insert. In this case, the desired insert may contain sequence from the full length cDNA that corresponds to the sequence encoding Reg1α. Such PCR methods include gene trapping and RACE methods.

[0081] Gene trapping may entail inserting a member of a cDNA library into a vector. The vector then may be denatured to produce single stranded molecules. Next, a substrate-bound probe, such a biotinylated oligo, may be used to trap cDNA inserts of interest. Biotinylated probes can be linked to an avidin-bound solid substrate. PCR methods can be used to amplify the trapped cDNA. To trap sequences corresponding to the full length genes, the labeled probe sequence may be based on the nucleic acid of SEQ ID Nos. 1 or 3, or a sequence complementary thereto. Random primers or primers specific to the library vector can be used to amplify the trapped cDNA. Such gene trapping techniques are described in Gruber et al., PCT WO 95/04745 and Gruber et al., U.S. Pat. No. 5,500,356. Kits are commercially available to perform gene trapping experiments from, for example, Life Technologies, Gaithersburg, Md., USA.

[0082] “Rapid amplification of cDNA ends,” or RACE, is a PCR method of amplifying cDNAs from a number of different RNAs. The cDNAs may be ligated to an oligonucleotide linker and amplified by PCR using two primers. One primer may be based on sequence from the instant nucleic acids, for which full length sequence is desired, and a second primer may comprise a sequence that hybridizes to the oligonucleotide linker to amplify the cDNA. A description of this method is reported in PCT Pub. No. WO 97/19110.

[0083] In preferred embodiments of RACE, a common primer may be designed to anneal to an arbitrary adaptor sequence ligated to cDNA ends (Apte and Siebert, Biotechniques 15:890-893, 1993; Edwards et al., Nuc. Acids Res. 19:5227-5232, 1991). When a single gene-specific RACE primer is paired with the common primer, preferential amplification of sequences between the single gene specific primer and the common primer occurs. Commercial cDNA pools modified for use in RACE are available.

[0084] Once the full-length cDNA or gene is obtained, DNA encoding variants can be prepared by site-directed mutagenesis, described in detail in Sambrook 15.3-15.63. The choice of codon or nucleotide to be replaced can be based on the disclosure herein on optional changes in amino acids to achieve altered protein structure and/or function.

[0085] As an alternative method to obtaining DNA or RNA from a biological material, such as serum, nucleic acid comprising nucleotides having the sequence of one or more nucleic acids of the invention can be synthesized. Thus, the invention encompasses nucleic acid molecules ranging in length from about 8 nucleotides (corresponding to at least 12 contiguous nucleotides which hybridize under stringent conditions to or are at least 80% identical to the nucleic acid sequence of SEQ ID Nos. 1 or 3, or a sequence complementary thereto) up to a maximum length suitable for one or more biological manipulations, including replication and expression, of the nucleic acid molecule. The invention includes but is not limited to (a) nucleic acid having the size of the full Reg1α gene, or a sequence complementary thereto; (b) the nucleic acid of (a) also comprising at least one additional gene, operably linked to permit expression of a fusion protein; (c) an expression vector comprising (a) or (b); (d) a plasmid comprising (a) or (b); and (e) a recombinant viral particle comprising (a) or (b).

[0086] The sequence of a nucleic acid of the present invention is not limited and can be any sequence of A, T, G, and/or C (for DNA) and A, U, G, and/or C (for RNA) or modified bases thereof, including inosine and pseudouridine. The choice of sequence will depend on the desired function and can be dictated by coding regions desired, the intron-like regions desired, and the regulatory regions desired.

[0087] Probe Preparation

[0088] Prior to hybridization of a probe nucleic acid to a patient sample, the nucleic acid samples must be prepared to facilitate subsequent detection of hybridization. The nucleic acid samples obtained from an individual (including nucleic acid sequences encoding Reg1α, and optionally, at least one other colorectal cancer associated marker) to be screened for colorectal cancer are capable of being bound by a nucleic acid probe of complementary sequence through one or more types of chemical bonds, usually through complementary base pairing, usually through hydrogen bond formation.

[0089] Probes useful in the invention for hybridizing to and thus identifying the presence of Reg1α or TIMP1, and optionally, at least one additional colorectal cancer associated marker may be designed to hybridize to a polynucleotide molecule derived from an mRNA transcript coding for Reg1α, or optionally, at least one additional colorectal cancer associated marker. As used herein, a “polynucleotide derived from an mRNA transcript” refers to a polynucleotide for which synthesis of the mRNA transcript or a subsequence thereof has ultimately served as a template. Thus, a cDNA reverse transcribed from an mRNA, an RNA transcribed from that cDNA, a DNA amplified from the cDNA, an RNA transcribed from the amplified DNA, etc., are all derived from the mRNA transcript and detection of such derived products is indicative of the presence and/or abundance of the original transcript in a sample. Thus, suitable target nucleic acid samples include, but are not limited to, mRNA transcripts of a gene or genes (i.e., Reg1α or a colorectal cancer associated marker), cDNA reverse transcribed from the mRNA, cRNA transcribed from the cDNA, DNA amplified from a gene or genes, RNA transcribed from amplified DNA, and the like. The polynucleotide probes used herein are preferably designed to hybridize to Reg1α, or optionally to a sequence encoding at least one other colorectal cancer associated marker.

[0090] Nucleic acid probes may be generated using techniques which are well known to those of skill in the art (see, e.g., Sambrook et al., Molecular Cloning: A Laboratory Manual (2nd ed.), Vols. 1-3, Cold Spring Harbor Laboratory, (1989), or Current Protocols in Molecular Biology, F. Ausubel et al., ed. Greene Publishing and Wiley-Interscience, New York (1987).

[0091] In order to measure the hybridization of a probe nucleic acid to a target sequence in a sample, the probe nucleic acid is preferably labeled with a detectable label. Any analytically detectable marker that is attached to or incorporated into a molecule may be used in the invention. An analytically detectable marker refers to any molecule, moiety or atom which is analytically detected and quantified.

[0092] Detectable labels suitable for use in the present invention include any composition detectable by spectroscopic, photochemical, biochemical, immunochemical, electrical, optical or chemical means. Useful labels in the present invention include biotin for staining with labeled streptavidin conjugate, magnetic beads (e.g., Dynabeads™), fluorescent dyes (e.g., fluorescein, texas red, rhodamine, green fluorescent protein, and the like), radiolabels (e.g., ³H, ¹²⁵I, 35S, ¹⁴C, or ³²P), enzymes (e.g., horse radish peroxidase, alkaline phosphatase and others commonly used in an ELISA), and colorimetric labels such as colloidal gold or colored glass or plastic (e.g., polystyrene, polypropylene, latex, etc.) beads. Patents teaching the use of such labels include U.S. Pat. Nos. 3,817,837; 3,850,752; 3,939,350; 3,996,345; 4,277,437; 4,275,149; and 4,366,241.

[0093] Means of detecting such labels are well known to those of skill in the art. Thus, for example, radiolabels may be detected using photographic film or scintillation counters, fluorescent markers may be detected using a photodetector to detect emitted light. Enzymatic labels are typically detected by providing the enzyme with a substrate and detecting the reaction product produced by the action of the enzyme on the substrate, and colorimetric labels are detected by simply visualizing the colored label.

[0094] The labels may be incorporated into a nucleic acid probe by any of a number of means well known to those of skill in the art. However, in a preferred embodiment, the label is simultaneously incorporated into the probe during an amplification step in the preparation of the probe polynucleotides. Thus, for example, polymerase chain reaction (PCR), or other amplification reaction, with labeled primers or labeled nucleotides will provide a labeled amplification product, and thus a labeled probe.

[0095] Alternatively, a label may be added directly to the probe. Means of attaching labels to polynucleotides are well known to those of skill in the art and include, for example nick translation or end-labeling (e.g. with a labeled RNA) and subsequent attachment (ligation) of a polynucleotide linker joining the sample polynucleotide to a label (e.g., a fluorophore).

[0096] In a preferred embodiment, the fluorescent modifications are by cyanine dyes e.g. Cy-3/Cy-5 dUTP, Cy-3/Cy-5 dCTP (Amersham Pharmacia) or alexa dyes (Khan, J., Simon, R., Bittner, M., Chen, Y., Leighton, S. B., Pohida, T., Smith, P. D., Jiang, Y., Gooden, G. C., Trent, J. M. & Meltzer, P. S. (1998) Cancer Res. 58, 50095013.).

[0097] In a preferred embodiment, a probe nucleic acid which is capable of hybridizing to Reg1α and a probe nucleic acid which is capable of hybridizing to a nucleic acid sequence encoding at least one additional colorectal cancer associated marker, are co-hybridized to a test sample (e.g., a serum sample). In this embodiment, the two probe samples used for comparison are labeled with different fluorescent dyes which produce distinguishable detection signals, for example, probes hybridizable with Reg1α are labeled with Cy5 and probes hybridizable with another colorectal cancer associated marker are labeled with Cy3. The differently labeled target samples are hybridized to the same microarray simultaneously.

[0098] In a preferred embodiment, a control probe may be co-hybridized to a sample along with a probe for Reg1α and/or a probe for an additional colorectal cancer associated marker, wherein the control probe is capable of hybridizing to a nucleic acid sequence known to be found in the clinical sample, for example, where the clinical sample is a serum sample, a control sequence may be a sequence encoding serum albumin, or fibrinogen.

[0099] Vectors and Host Cells

[0100] The present invention further provides vectors and plasmids useful for directing the expression of Reg1α or TIMP1 or other colorectal cancer associated markers, and further provides host cells which express the vectors and plasmids provided herein. Nucleic acid sequences useful for the expression from a vector or plasmid as described below include, but are not limited to any nucleic acid or gene sequence identified as being differentially regulated by the methods described above, and further include therapeutic nucleic acid molecules, such as antisense molecules. The host cell may be any prokaryotic or eukaryotic cell. Ligating the polynucleotide sequence into a gene construct, such as an expression vector, and transforming or transfecting into hosts, either eukaryotic (yeast, avian, insect or mammalian) or prokaryotic (bacterial cells), are standard procedures well known in the art.

[0101] Vectors

[0102] There is a wide array of vectors known and available in the art that are useful for the expression of differentially expressed nucleic acid molecules according to the invention. The selection of a particular vector clearly depends upon the intended use the polypeptide encoded by the differentially expressed nucleic acid. For example, the selected vector must be capable of driving expression of the polypeptide in the desired cell type, whether that cell type be prokaryotic or eukaryotic. Many vectors comprise sequences allowing both prokaryotic vector replication and eukaryotic expression of operably linked gene sequences.

[0103] Vectors useful according to the invention may be autonomously replicating, that is, the vector, for example, a plasmid, exists extrachromosomally and its replication is not necessarily directly linked to the replication of the host cell's genome. Alternatively, the replication of the vector may be linked to the replication of the host's chromosomal DNA, for example, the vector may be integrated into the chromosome of the host cell as achieved by retroviral vectors.

[0104] Vectors useful according to the invention preferably comprise sequences operably linked to the sequence of interest (e.g., Reg1α) that permit the transcription and translation of the sequence. Sequences that permit the transcription of the linked sequence of interest include a promoter and optionally also include an enhancer element or elements permitting the strong expression of the linked sequences. The term “transcriptional regulatory sequences” refers to the combination of a promoter and any additional sequences conferring desired expression characteristics (e.g., high level expression, inducible expression, tissue- or cell-type-specific expression) on an operably linked nucleic acid sequence.

[0105] The selected promoter may be any DNA sequence that exhibits transcriptional activity in the selected host cell, and may be derived from a gene normally expressed in the host cell or from a gene normally expressed in other cells or organisms. Examples of promoters include, but are not limited to the following: A) prokaryotic promoters—E. coli lac, tac, or trp promoters, lambda phage P_{R} or P_{L} promoters, bacteriophage T7, T3, Sp6 promoters, B. subtilis alkaline protease promoter, and the B. stearothermophilus maltogenic amylase promoter, etc.; B) eukaryotic promoters—yeast promoters, such as GAL1, GAL4 and other glycolytic gene promoters (see for example, Hitzeman et al., 1980, J. Biol. Chem. 255: 12073-12080; Alber & Kawasaki, 1982, J. Mol. Appl. Gen. 1: 419-434), LEU2 promoter (Martinez-Garcia et al., 1989, Mol Gen Genet. 217: 464-470), alcohol dehydrogenase gene promoters (Young et al., 1982, in Genetic Engineering of Microorganisms for Chemicals, Hollaender et al., eds., Plenum Press, NY), or the TPI1 promoter (U.S. Pat. No. 4,599,311); insect promoters, such as the polyhedrin promoter (U.S. Pat. No. 4,745,051; Vasuvedan et al., 1992, FEBS Lett. 311: 7-11), the P10 promoter (Vlak et al., 1988, J. Gen. Virol. 69: 765-776), the Autographa californica polyhedrosis virus basic protein promoter (EP 397485), the baculovirus immediate-early gene promoter gene 1 promoter (U.S. Pat. Nos. 5,155,037 and 5,162,222), the baculovirus 39K delayed-early gene promoter (also U.S. Pat. Nos. 5,155,037 and 5,162,222) and the OpMNPV immediate early promoter 2; mammalian promoters—the SV40 promoter (Subramani et al., 1981, Mol. Cell. Biol. 1: 854-864), metallothionein promoter (MT-1; Palmiter et al., 1983, Science 222: 809-814), adenovirus 2 major late promoter (Yu et al., 1984, Nucl. Acids Res. 12: 9309-21), cytomegalovirus (CMV) or other viral promoter (Tong et al., 1998, Anticancer Res. 18: 719-725), or even the endogenous promoter of a gene of interest in a particular cell type.

[0106] A selected promoter may also be linked to sequences rendering it inducible or tissue-specific. For example, the addition of a tissue-specific enhancer element upstream of a selected promoter may render the promoter more active in a given tissue or cell type. Alternatively, or in addition, inducible expression may be achieved by linking the promoter to any of a number of sequence elements permitting induction by, for example, thermal changes (temperature sensitive), chemical treatment (for example, metal ion- or IPTG-inducible), or the addition of an antibiotic inducing agent (for example, tetracycline).

[0107] Regulatable expression is achieved using, for example, expression systems that are drug inducible (e.g., tetracycline, rapamycin or hormone-inducible). Drug-regulatable promoters that are particularly well suited for use in mammalian cells include the tetracycline regulatable promoters, and glucocorticoid steroid-, sex hormone steroid-, ecdysone-, lipopolysaccharide (LPS)- and isopropylthiogalactoside (IPTG)-regulatable promoters. A regulatable expression system for use in mammalian cells should ideally, but not necessarily, involve a transcriptional regulator that binds (or fails to bind) nonmammalian DNA motifs in response to a regulatory agent, and a regulatory sequence that is responsive only to this transcriptional regulator.

[0108] Tissue-specific promoters may also be used to advantage in differentially expressed sequence-encoding constructs of the invention. A wide variety of tissue-specific promoters is known. As used herein, the term “tissue-specific” means that a given promoter is transcriptionally active (i.e., directs the expression of linked sequences sufficient to permit detection of the polypeptide product of the promoter) in less than all cells or tissues of an organism. A tissue specific promoter is preferably active in only one cell type, but may, for example, be active in a particular class or lineage of cell types (e.g., hematopoietic cells). A tissue specific promoter useful according to the invention comprises those sequences necessary and sufficient for the expression of an operably linked nucleic acid sequence in a manner or pattern that is essentially the same as the manner or pattern of expression of the gene linked to that promoter in nature. The following is a non-exclusive list of tissue specific promoters and literature references containing the necessary sequences to achieve expression characteristic of those promoters in their respective tissues; the entire content of each of these literature references is incorporated herein by reference. Examples of tissue specific promoters useful in the present invention are as follows:

[0109] Bowman et al., 1995 Proc. Natl. Acad. Sci. USA 92,12115-12119 describe a brain-specific transferrin promoter; the synapsin I promoter is neuron specific (Schoch et al., 1996 J. Biol. Chem. 271, 3317-3323); the nestin promoter is post-mitotic neuron specific (Uetsuki et al., 1996 J. Biol. Chem. 271, 918-924); the neurofilament light promoter is neuron specific (Charron et al., 1995 J. Biol. Chem. 270, 30604-30610); the acetylcholine receptor promoter is neuron specific (Wood et al., 1995 J. Biol. Chem. 270, 30933-30940); and the potassium channel promoter is high-frequency firing neuron specific (Gan et al., 1996 J. Biol. Chem 271, 5859-5865). Any tissue specific transcriptional regulatory sequence known in the art may be used to advantage with a vector encoding a differentially expressed nucleic acid sequence obtained from an animal subjected to pain.

[0110] In addition to promoter/enhancer elements, vectors useful according to the invention may further comprise a suitable terminator. Such terminators include, for example, the human growth hormone terminator (Palmiter et al., 1983, supra), or, for yeast or fungal hosts, the TPI1 (Alber & Kawasaki, 1982, supra) or ADH3 terminator (McKnight et al., 1985, EMBO J. 4: 2093-2099).

[0111] Vectors useful according to the invention may also comprise polyadenylation sequences (e.g., the SV40 or Ad5E1b poly(A) sequence), and translational enhancer sequences (e.g., those from Adenovirus VA RNAs). Further, a vector useful according to the invention may encode a signal sequence directing the recombinant polypeptide to a particular cellular compartment or, alternatively, may encode a signal directing secretion of the recombinant polypeptide.

[0112] a. Plasmid Vectors.

[0113] Any plasmid vector that allows expression of a coding sequence of interest (e.g., the coding sequence of Reg1α) in a selected host cell type is acceptable for use according to the invention. A plasmid vector useful in the invention may have any or all of the above-noted characteristics of vectors useful according to the invention. Plasmid vectors useful according to the invention include, but are not limited to the following examples: Bacterial—pQE70, pQE60, pQE-9 (Qiagen) pBs, phagescript, psiX174, pBluescript SK, pBsKS, pNH8a, pNH16a, pNH18a, pNH46a (Stratagene); pTrc99A, pKK223-3, pKK233-3, pDR540, and pRIT5 (Pharmacia); Eukaryotic—pWLneo, pSV2cat, pOG44, pXT1, pSG (Stratagene) pSVK3, pBPV, pMSG, and pSVL (Pharmacia). However, any other plasmid or vector may be used as long as it is replicable and viable in the host.

[0114] b. Bacteriophage Vectors.

[0115] There are a number of well known bacteriophage-derived vectors useful according to the invention. Foremost among these are the lambda-based vectors, such as Lambda Zap II or Lambda-Zap Express vectors (Stratagene) that allow inducible expression of the polypeptide encoded by the insert. Others include filamentous bacteriophage such as the M13-based family of vectors.

[0116] c. Viral Vectors.

[0117] A number of different viral vectors are useful according to the invention, and any viral vector that permits the introduction and expression of one or more of the polynucleotides of the invention in cells is acceptable for use in the methods of the invention. Viral vectors that can be used to deliver foreign nucleic acid into cells include but are not limited to retroviral vectors, adenoviral vectors, adeno-associated viral vectors, herpesviral vectors, and Semliki forest viral (alphaviral) vectors. Defective retroviruses are well characterized for use in gene transfer (for a review see Miller, A. D. (1990) Blood 76:271). Protocols for producing recombinant retroviruses and for infecting cells in vitro or in vivo with such viruses can be found in Current Protocols in Molecular Biology, Ausubel, F. M. et al. (eds.) Greene Publishing Associates, (1989), Sections 9.10-9.14, and other standard laboratory manuals.

[0118] In addition to retroviral vectors, Adenovirus can be manipulated such that it encodes and expresses a gene product of interest but is inactivated in terms of its ability to replicate in a normal lytic viral life cycle (see for example Berkner et al., 1988, BioTechniques 6:616; Rosenfeld et al., 1991, Science 252:431-434; and Rosenfeld et al., 1992, Cell 68:143-155). Suitable adenoviral vectors derived from the adenovirus strain Ad type 5 d1324 or other strains of adenovirus (e.g., Ad2, Ad3, Ad7 etc.) are well known to those skilled in the art. Adeno-associated virus (AAV) is a naturally occurring defective virus that requires another virus, such as an adenovirus or a herpes virus, as a helper virus for efficient replication and a productive life cycle. (For a review see Muzyczka et al., 1992, Curr. Topics in Micro. and Immunol. 158:97-129). An AAV vector such as that described in Traschin et al. (1985, Mol. Cell. Biol. 5:3251-3260) can be used to introduce nucleic acid into cells. A variety of nucleic acids have been introduced into different cell types using AAV vectors (see, for example, Hermonat et al., 1984, Proc. Natl. Acad. Sci. USA 81: 6466-6470; and Traschin et al., 1985, Mol. Cell. Biol. 4: 2072-2081).

[0119] Host Cells

[0120] Any cell into which a recombinant vector carrying a gene of interest (e.g., a sequence encoding Reg1α) may be introduced and wherein the vector is permitted to drive the expression of the peptide encoded by the differentially expressed sequence is useful according to the invention. Any cell in which a differentially expressed molecule of the invention may be expressed and preferably detected is a suitable host, wherein the host cell is preferably a mammalian cell and more preferably a human cell. Vectors suitable for the introduction of nucleic acid sequences to host cells from a variety of different organisms, both prokaryotic and eukaryotic, are described herein above or known to those skilled in the art.

[0121] Host cells may be prokaryotic, such as any of a number of bacterial strains, or may be eukaryotic, such as yeast or other fungal cells, insect or amphibian cells, or mammalian cells including, for example, rodent, simian or human cells. Cells may be primary cultured cells, for example, primary human fibroblasts or keratinocytes, or may be an established cell line, such as NIH3T3, 293T or CHO cells. Further, mammalian cells useful in the present invention may be phenotypically normal or oncogenically transformed. It is assumed that one skilled in the art can readily establish and maintain a chosen host cell type in culture.

[0122] Introduction of Vectors to Host Cells.

[0123] Vectors useful in the present invention may be introduced to selected host cells by any of a number of suitable methods known to those skilled in the art. For example, vector constructs may be introduced to appropriate bacterial cells by infection, in the case of E. coli bacteriophage vector particles such as lambda or M13, or by any of a number of transformation methods for plasmid vectors or for bacteriophage DNA. For example, standard calcium-chloride-mediated bacterial transformation is still commonly used to introduce naked DNA to bacteria (Sambrook et al., 1989, Molecular Cloning, A Laboratory Manual, Cold Spring Harbor Laboratory Press, Cold Spring Harbor, N.Y.), but electroporation may also be used (Ausubel et al., 1988, Current Protocols in Molecular Biology, (John Wiley & Sons, Inc., NY, N.Y.)).

[0124] For the introduction of vector constructs to yeast or other fungal cells, chemical transformation methods are generally used (e.g. as described by Rose et al., 1990, Methods in Yeast Genetics, Cold Spring Harbor Laboratory Press, Cold Spring Harbor, N.Y.). For transformation of S. cerevisiae, for example, the cells are treated with lithium acetate to achieve transformation efficiencies of approximately 10⁴ colony-forming units (transformed cells)/μg of DNA. Transformed cells are then isolated on selective media appropriate to the selectable marker used. Alternatively, or in addition, plates or filters lifted from plates may be scanned for GFP fluorescence to identify transformed clones.

[0125] For the introduction of vectors comprising a sequence of interest to mammalian cells, the method used will depend upon the form of the vector. Plasmid vectors may be introduced by any of a number of transfection methods, including, for example, lipid-mediated transfection (“lipofection”), DEAE-dextran-mediated transfection, electroporation or calcium phosphate precipitation. These methods are detailed, for example, in Current Protocols in Molecular Biology (Ausubel et al., 1988, John Wiley & Sons, Inc., NY, N.Y.).

[0126] Lipofection reagents and methods suitable for transient transfection of a wide variety of transformed and non-transformed or primary cells are widely available, making lipofection an attractive method of introducing constructs to eukaryotic, and particularly mammalian cells in culture. For example, LipofectAMINE™ (Life Technologies) or LipoTaxi™ (Stratagene) kits are available. Other companies offering reagents and methods for lipofection include Bio-Rad Laboratories, CLONTECH, Glen Research, InVitrogen, JBL Scientific, MBI Fermentas, PanVera, Promega, Quantum Biotechnologies, Sigma-Aldrich, and Wako Chemicals USA.

[0127] Following transfection with a vector of the invention, eukaryotic (e.g., human) cells successfully incorporating the construct (intra- or extrachromosomally) may be selected, as noted above, by either treatment of the transfected population with a selection agent, such as an antibiotic whose resistance gene is encoded by the vector, or by direct screening using, for example, FACS of the cell population or fluorescence scanning of adherent cultures. Frequently, both types of screening may be used, wherein a negative selection is used to enrich for cells taking up the construct and FACS or fluorescence scanning is used to further enrich for cells expressing differentially expressed polynucleotides or to identify specific clones of cells, respectively. For example, a negative selection with the neomycin analog G418 (Life Technologies, Inc.) may be used to identify cells that have received the vector, and fluorescence scanning may be used to identify those cells or clones of cells that express the vector construct to the greatest extent.

[0128] Reg1α and TIMP1 Polypeptides

[0129] The present invention provides a method for the detection of colorectal cancer in an individual by detecting the presence of Reg1α or TIMP1 in a clinical sample from an individual. In addition the invention encompasses the detection of cancer by identifying Reg1α or TIMP1 gene product in colon tissue or cells. Alternatively, the invention relates to a method for the detection of colorectal cancer in an individual wherein colorectal cancer is identified by detecting the presence of Reg1α or TIMP1 and at least one additional colorectal cancer associated marker in the clinical sample from an individual. Polypeptides of the present invention, the detection of which is indicative of colorectal cancer include those having the sequence shown in one or more of SEQ ID Nos. 2, 4, or 100, or alternatively, which are encoded by one or more of SEQ ID Nos. 1, 3 or 33.

[0130] Preferred polypeptides which can be detected and are thus indicative of colorectal cancer in an individual are those that are encoded by nucleic acid sequences at least about 70%, 75%, 80%, 90%, 95%, 97%, or 98% identical to a mRNA sequence complementary to the nucleic acid sequence of SEQ ID Nos. 1, 3 or 33. Particularly preferred polypeptides are those of SEQ ID Nos. 2, 4, or 99, or fragments thereof, or polypeptide sequences which are at least about 70%, 75%, 80%, 90%, 95%, 98% or 99% identical in sequence to the amino acid sequence of one or more of SEQ ID Nos. 2, 4, or 100.

[0131] In addition to a method for detecting colorectal cancer by identifying the presence of the Reg1α or TIMP1 polypeptide in a clinical sample from an individual, the invention further comprises a method of detecting cancer by identifying the presence of Reg1α or TIMP1 in addition to at least one other colorectal cancer associated marker in the same sample (e.g., in the same serum, tissue, or cell sample).

[0132] Antibodies

[0133] The invention provides a method for colorectal cancer detection comprising the step of detecting the presence of Reg1α or TIMP1 (and optionally, at least one additional colorectal cancer associated marker) in a clinical sample from an individual. In one embodiment, the presence of Reg1α or TIMP1, or other marker, in such a sample is detected using a polypeptide ligand which is preferably detectably labeled, and is capable of binding to Reg1α or TIMP1, and if present, the other marker, in the sample. In a preferred embodiment, the polypeptide ligand is an antibody. Antibodies of the invention include, but are not limited to, polyclonal, monoclonal, multispecific, human, humanized, or chimeric antibodies, single chain antibodies, Fab fragments, Fv fragments F(ab′) fragments, fragments produced by a Fab expression library, anti-iodiotypic antibodies, or other epitope binding polypeptide. Preferably, an antibody, useful in the present invention for the detection of Reg1α or TIMP1 (and optionally at least one additional colorectal cancer associated marker), is a human antibody or fragment thereof, including scFv, Fab, Fab′, F(ab′), Fd, single chain antibody, of Fv. Antibodies, useful in the invention may include a complete heavy or light chain constant region, or a portion thereof, or an absence thereof. An antibody, useful in the invention, may be obtained from an art recognized host, such as rabbit, mouse, rat, donkey, sheep, goat, guinea pig, camel, horse, or chicken. In one embodiment, an antibody, useful in the invention can be a humanized antibody, in which amino acids have been replaced in the non-antigen binding regions in order to more closely resemble a human antibody, while still retaining the original binding ability. Methods for making humanized antibodies are described in Teng et al., 1983, Proc. Natl. Acad. Sci. USA 80: 7308-7312; Kozbor et al., 1983, Immunology Today 4: 7279; Olsson et al., 1982, Meth. Enzymol. 92: 3-16; WO 92/06193; EP 0239400.

[0134] Antibodies of the present invention may be monospecific, dispecific, trispecific, or of greater multispecificity. As such, Reg1α or TIMP1 and optionally an additional colorectal cancer associated marker useful for the detection of colorectal cancer may be detected with separate antibodies, or may be detected with the same antibody. Alternatively, a multispecific antibody may exhibit different specificities for different epitopes on the same protein (e.g., different epitopes on Reg1α). While specificity of an antibody useful in the present invention to either Reg1α or one or more additional colorectal cancer associated markers is preferred, antibodies that bind polypeptides with at least 95%, 90%, 85%, 75%, 65%, 55%, and at least 50% identity to a polypeptide useful in the present invention for the detection of colorectal cancer (i.e., Reg1α, and/or an additional colorectal cancer associated marker) are also included in the present invention. Also encompassed in the present invention are antibodies which bind to polypeptide molecules which are encoded by one or more nucleic acid sequences which are complementary to, or hybridize to the sequences of SEQ ID Nos. 1, 3 or 33, or one or more sequences which are complementary to, or hybridize to a nucleic acid sequence which encodes an additional colorectal cancer associated marker as described herein.

[0135] Antibodies of the present invention which are useful for the detection of colorectal cancer may further act as agonists or antagonists of the activity of the polypeptide molecules to which they bind, and may thus be useful as therapeutic molecules for the treatment or prevention of colorectal cancer.

[0136] An important, but not limiting, role of an antibody of the present invention is to provide for the purification, or detection of Reg1α or TIMP1 or other colorectal cancer associated markers in a patient sample, including both in vitro and in vivo detection methods. Antibodies useful for the detection of colorectal cancer as described herein do not have to be used alone, and can be fused to other polypeptides, including a heterologous polypeptide at the N- or C-terminus of the antibody polypeptide sequence. For example, an antibody useful in the present invention may be fused with a detectable label to facilitate detection of the antibody when bound to a target polypeptide. Methods for detectably labeling an antibody polypeptide are known to those of skill in the art.

[0137] For the production of antibodies useful in the present invention, various hosts including goats, rabbits, rats, mice, etc., may be immunized by injection with the protein products (or any portion, fragment, or oligonucleotide thereof which retains immunogenic properties) of the candidate genes of the invention. Depending on the host species, various adjuvants may be used to increase the immunological response. Such adjuvants include but are not limited to Freund's, mineral gels such as aluminum hydroxide, and surface active substances such as lysolecithin, pluronic polyols, polyanions, peptides, oil emulsions, keyhole limpet hemocyanin, and dinitrophenol. BCG (bacilli Calmette-Guerin) and Corynebacterium parvum are potentially useful human adjuvants.

[0138] Polyclonal antisera or monoclonal antibodies can be made using methods known in the art. A mammal such as a mouse, hamster, or rabbit, can be immunized with an immunogenic form of a Reg1α or TIMP1 polypeptide, fragment, modified form thereof, or variant form thereof. Alternatively, an animal may be immunized with an immunogenic form of one or more additional colorectal cancer associated marker polypeptides. Techniques for conferring immunogenicity on such molecules include conjugation to carriers or other techniques well known in the art. For example, the immunogenic molecule can be administered in the presence of adjuvant as described above. Immunization can be monitored by detection of antibody titers in plasma or serum. Standard immunoassay procedures can be used with the immunogen as antigen to assess the levels and the specificity of antibodies. Following immunization, antisera can be obtained and, if desired, polyclonal antibodies isolated from the sera.

[0139] To produce monoclonal antibodies, antibody producing cells (lymphocytes) can be harvested from an immunized animal and fused with myeloma cells by standard somatic cell fusion procedures thus immortalizing these cells and yielding hybridoma cells. Such techniques are well known in the art (see, e.g., Kohler and Milstein, 1975, Nature 256: 495-497; Kozbor et al., 1983, Immunol. Today 4: 72, Cole et al., 1985, In Monoclonal Antibodies in Cancer Therapy, Allen R. Bliss, Inc., pages 77-96). Additionally, techniques described for the production of single-chain antibodies (U.S. Pat. No. 4,946,778) can be adapted to produce antibodies according to the invention.

[0140] Antibody fragments which can specifically bind to a polypeptide of the invention such as Reg1α or TIMP1 or other colorectal cancer associated marker polypeptides, fragments thereof, modified forms thereof, and variants thereof, also may be generated by known techniques. For example, such fragments include, but are not limited to, F(ab′)₂ fragments which can be produced by pepsin digestion of the antibody molecule and the Fab fragments which can be generated by reducing the disulfide bridges of the F(ab′)₂ fragments. VH regions and FV regions can be expressed in bacteria using phage expression libraries (e.g., Ward et al., 1989, Nature 341: 544-546; Huse et al., 1989, Science 246: 1275-1281; McCafferty et al., 1990, Nature 348: 552-554).

[0141] Chimeric antibodies, i.e., antibody molecules that combine a non-human animal variable region and a human constant region also are within the scope of the invention. Chimeric antibody molecules include, for example, the antigen binding domain from an antibody of a mouse, rat, or other species, with human constant regions. Standard methods may be used to make chimeric antibodies containing the immunoglobulin variable region which recognizes the gene product of Reg1α antigens of the invention (see, e.g., Morrison et al., 1985, Proc. Natl. Acad. Sci. USA 81: 6851; Takeda et al., 1985, Nature 314: 452; U.S. Pat. No. 4,816,567; U.S. Pat. No. 4,816,397).

[0142] Other Colorectal Cancer Specific Analysis

[0143] In addition to the detection of colorectal cancer by identifying expression of Reg1α or TIMP1, or detecting Reg1α or TIMP1 polypeptides, the present invention further comprises a method for detecting colorectal cancer wherein a nucleic acid molecule encoding Reg1α or TIMP1, or Reg1α or TIMP1 polypeptide is identified in combination with at least one other nucleic acid sequence encoding a known colorectal cancer associated marker in a clinical sample from an individual. Alternatively, the presence of Reg1α or TIMP1 is detected in combination with at least one additional colorectal cancer marker amino acid sequence. Similar to the methods described above for Reg1α, a nucleic acid molecule which encodes at least one other colorectal cancer associated marker may be used to generate a nucleic acid probe for detection of the colorectal cancer associated marker sequence in a patient sample, or may be used to generate amplification primers to amplify the colorectal cancer associated marker sequence from a patient sample comprising the sequence, thus identifying the presence of the colorectal cancer associated marker in the sample, and thus indicating the detection of colorectal cancer. A colorectal cancer associated marker polypeptide sequence may be used, as described above for Reg1α to generate antibodies useful for detection of the colorectal cancer associated marker in a clinical sample. Methods for detecting a colorectal cancer associated marker nucleic acid or amino acid sequence are described below, and may be adapted from the methods for the detection of Reg1α nucleic acid or amino acid in a clinical sample.

[0144] A “colorectal cancer associated marker” useful in the present invention, refers to a polypeptide or nucleic acid sequence which exhibits over- or underexpression of at least 10% in colorectal cancer cells, tissue, or serum obtained from an individual having colorectal cancer, relative to the level of expression in cells, tissue, or serum obtained from an individual that does not have colorectal cancer. Non-limiting examples of colorectal cancer associated markers useful in the present invention include the nucleic acid molecules of SEQ ID Nos 1, 3, 5-71, and/or the polypeptide molecules of SEQ ID Nos 2, 4, 72-138. In one embodiment, the polypeptide sequences of SEQ ID Nos 2, 4, 72-138 are encoded by the nucleic acid sequences of 1, 3, 5-71, respectively. It will be appreciated by one of skill in the art that, where the method of the invention relates to detection of Reg1α and at least one other colorectal cancer associated marker, TIMP1 may be included as a potential “other colorectal cancer associated marker”. Likewise, where the detection method is based on the detection of TIMP1 and at least one other colorectal cancer associated marker, Reg1α may be included as a potential “other colorectal cancer associated marker”. Alternatively, a colorectal cancer associated marker, as used in the present invention, may refer to a carbohydrate epitope present on a polypeptide or nucleic acid molecule and/or an antibody molecule which recognizes and is capable of binding to such an epitope, wherein the carbohydrate epitope is known to be associated with the presence of colorectal cancer in an individual. Such carbohydrate epitopes may be present on more than one unrelated protein or polypeptide. In one embodiment, such a carbohydrate epitope is CA 19-9, also known as sialyl-Lewis^{a}, is a tumor marker defined by a monoclonal antibody as a carbohydrate epitope, related to the blood group antigens, composed of a branching, 5-sugar structure covalently bound to a variety of glycoproteins or glycolipids. The proteins primarily belong to the mucin family and the lipids are usually membrane associated. The CA 19-9 epitope is typically the terminal moiety of a complex, O-linked carbohydrate structure on either macromolecule. Other tumor markers also defined as various carbohydrate epitopes useful in the present invention as a “colorectal cancer associated marker” include CA72-4 which is indicative of the presence of the Tag 72 antigen, which is a triply sialylated Tn antigen on varing protein backbones; Thomsen Freidenreich antigen (TF), which is a sialylated n-acetyl galactosamine moeity O-linked to various peptides; Tn and sialyated Tn (sTn) which is the backbone of the TF antigen without the terminal n-acetyl galactosamine moeity, O-linked to various peptides; CA 50 which is an epitope corresponding to sialylated Lewis A blood group antigen; CA 549 which is a CHO moiety on muc-1; CA 242 which is a sialylated CHO; LASA which is a lipid associated sialic acid, that is, a lipid without a protein associated to it; Du-PAN's 1-5, which are pancreatic associated mucin-like CHO antigens. These useful colon cancer specific antigens and others are known in the art and are described, for example, in “Serological Cancer Markers” Sell, S., Ed. 1992. Humana Press Inc., Totowa, N.J.

[0145] Table 1 below shows a list of “colorectal cancer associated markers” useful in the invention (although colorectal cancer associated markers useful in the invention are not limited to those shown in Table 1), and there correspondence with the sequences set forth in the “Sequence listing”.

TABLE 1

| SEQ ID | Gene | | |
|---|---|---|---|
| NO | Symbol | Length | Type |
| 5 | CEACAM5 | 2974 | DNA |
| 6 | AFP | 2032 | DNA |
| 7 | IL8 | 1639 | DNA |
| 8 | SPP1 | 1524 | DNA |
| 9 | KIAA1077 | 5500 | DNA |
| 10 | MMP12 | 1778 | DNA |
| 11 | UBD | 777 | DNA |
| 12 | COL1A1 | 5921 | DNA |
| 13 | LUM | 1804 | DNA |
| 14 | ENC1 | 4827 | DNA |
| 15 | PIGPC1 | 1098 | DNA |
| 16 | GTF3A | 1381 | DNA |
| 17 | CTSB | 1978 | DNA |
| 18 | MCJ | 1074 | DNA |
| 19 | SLC12A2 | 4098 | DNA |
| 20 | C20orf42 | 3120 | DNA |
| 21 | SDBCAG84 | 1337 | DNA |
| 22 | NAP1L1 | 2908 | DNA |
| 23 | OSF-2 | 3213 | DNA |
| 24 | COL6A3 | 10558 | DNA |
| 25 | SPARC | 2133 | DNA |
| 26 | TGFBI | 2691 | DNA |
| 27 | FN1 | 8027 | DNA |
| 28 | COL1A2 | 5084 | DNA |
| 29 | S100A11 | 595 | DNA |
| 30 | LC27 | 2116 | DNA |
| 31 | IRAK1 | 3583 | DNA |
| 32 | IFITM2 | 905 | DNA |
| 33 | TIMP1 | 782 | DNA |
| 34 | IGFBP7 | 1124 | DNA |
| 35 | IFITM1 | 647 | DNA |
| 36 | COL3A1 | 5489 | DNA |
| 37 | IGFBP5 | 1722 | DNA |
| 38 | RegIV | 1200 | DNA |
| 39 | AGR2 | 1701 | DNA |
| 40 | HSPCA | 2259 | DNA |
| 41 | KIAA1199 | 7080 | DNA |
| 42 | MMP1 | 1973 | DNA |
| 43 | MMP7 | 1127 | DNA |
| 44 | TSC | 1163 | DNA |
| 45 | HAIK1 | 2007 | DNA |
| 46 | DAP3 | 1650 | DNA |
| 47 | | 2566 | DNA |
| 48 | | 2067 | DNA |
| 49 | KRT8 | 1752 | DNA |
| 50 | KRT18 | 1412 | DNA |
| 51 | KRT19 | 1407 | DNA |
| 52 | KRT20 | 1723 | DNA |
| 53 | MUC1 | 4139 | DNA |
| 54 | MUC2 | 15720 | DNA |
| 55 | MUC3 | 4707 | DNA |
| 56 | MUC5AC | 4151 | DNA |
| 57 | CGB5 | 880 | DNA |
| 58 | EGFR | 5532 | DNA |
| 59 | ERBB2 | 4530 | DNA |
| 60 | FTH1 | 801 | DNA |
| 61 | FTL | 878 | DNA |
| 62 | ALPP | 2747 | DNA |
| 63 | ODC1 | 2062 | DNA |
| 64 | MUC16 | 3557 | DNA |
| 65 | CEACAM1 | 3464 | DNA |
| 66 | CEACAM3 | 1022 | DNA |
| 67 | CEACAM4 | 1190 | DNA |
| 68 | CEACAM6 | 2249 | DNA |
| 69 | CEACAM7 | 2292 | DNA |
| 70 | CEACAM8 | 2297 | DNA |
| 71 | CA9 | 1552 | DNA |
| 72 | CEACAM5 | 702 | Protein |
| 73 | AFP | 609 | Protein |
| 74 | IL8 | 99 | Protein |
| 75 | SPP1 | 300 | Protein |
| 76 | KIAA1077 | 871 | Protein |
| 77 | MMP12 | 470 | Protein |
| 78 | UBD | 165 | Protein |
| 79 | COL1A1 | 1464 | Protein |
| 80 | LUM | 338 | Protein |
| 81 | ENC1 | 589 | Protein |
| 82 | PIGPC1 | 193 | Protein |
| 83 | GTF3A | 423 | Protein |
| 84 | CTSB | 339 | Protein |
| 85 | MCJ | 150 | Protein |
| 86 | SLC12A2 | 1212 | Protein |
| 87 | C20orf42 | 230 | Protein |
| 88 | SDBCAG84 | 383 | Protein |
| 89 | NAP1L1 | 391 | Protein |
| 90 | OSF-2 | 836 | Protein |
| 91 | COL6A3 | 3176 | Protein |
| 92 | SPARC | 303 | Protein |
| 93 | TGFBI | 683 | Protein |
| 94 | FN1 | 2355 | Protein |
| 95 | COL1A2 | 1366 | Protein |
| 96 | S100A11 | 105 | Protein |
| 97 | LC27 | 283 | Protein |
| 98 | IRAK1 | 712 | Protein |
| 99 | IFITM2 | 132 | Protein |
| 100 | TIMP1 | 207 | Protein |
| 101 | IGFBP7 | 282 | Protein |
| 102 | IFITM1 | 125 | Protein |
| 103 | COL3A1 | 1466 | Protein |
| 104 | IGFBP5 | 272 | Protein |
| 105 | RegIV | 158 | Protein |
| 106 | AGR2 | 175 | Protein |
| 107 | HSPCA | 732 | Protein |
| 108 | KIAA1199 | 1361 | Protein |
| 109 | MMP1 | 469 | Protein |
| 110 | MMP7 | 267 | Protein |
| 111 | TSC | 216 | Protein |
| 112 | HAIK1 | 422 | Protein |
| 113 | DAP3 | 398 | Protein |
| 114 | | 75 | Protein |
| 115 | | 163 | Protein |
| 116 | KRT8 | 483 | Protein |
| 117 | KRT18 | 430 | Protein |
| 118 | KRT19 | 400 | Protein |
| 119 | KRT20 | 424 | Protein |
| 120 | MUC1 | 1255 | Protein |
| 121 | MUC2 | 5179 | Protein |
| 122 | MUC3 | 1217 | Protein |
| 123 | MUC5AC | 1373 | Protein |
| 124 | CGB5 | 165 | Protein |
| 125 | EGFR | 1210 | Protein |
| 126 | ERBB2 | 1255 | Protein |
| 127 | FTH1 | 190 | Protein |
| 128 | FTL | 175 | Protein |
| 129 | ALPP | 535 | Protein |
| 130 | ODC1 | 461 | Protein |
| 131 | MUC16 | 1148 | Protein |
| 132 | CEACAM1 | 526 | Protein |
| 133 | CEACAM3 | 212 | Protein |
| 134 | CEACAM4 | 244 | Protein |
| 135 | CEACAM6 | 344 | Protein |
| 136 | CEACAM7 | 265 | Protein |
| 137 | CEACAM8 | 349 | Protein |
| 138 | CA9 | 459 | Protein |

[0146] Detection Assays

[0147] The present invention provides method for detecting colorectal cancer, or alternatively, determining whether a subject is at risk for developing colorectal cancer by detecting the disclosed biomarkers (i.e., the nucleic acid sequence of Reg1α or TIMP1 and optionally, one or more nucleic acid sequences encoding an additional colorectal cancer associated marker and/or polypeptide markers such as Reg1α or TIMP1 and optionally, at least one additional colorectal cancer associated marker) for the disease or condition encoded thereby.

[0148] In clinical applications, human tissue samples, preferably serum, can be screened for the presence and/or absence of Reg1α or TIMP1 and/or other colorectal cancer associated markers identified herein. Such samples may comprise tissue samples, whole cells, cell lysates, or isolated nucleic acids, including, for example, needle biopsy cores, surgical resection samples, lymph node tissue, or serum. A sample for analysis as described herein is preferably a serum sample. A serum sample may be obtained from an individual using methods which are well known to those of skill in the art. Briefly, a whole venous or arterial blood sample from an individual is collected into a test tube. The whole blood sample is permitted to incubate at room temperature for approximately 15-30 to allow the blood to clot. Once clotted, the sample is centrifuged at approximately 1500 to 3000 rpm for 5-30 minutes to completely separate the serum from the cellular components. This centrifugation may be repeated if necessary to achieve complete separation. The resulting serum sample may be subsequently screened for the presence of Reg1α nucleic acid or amino acid and/or one or more additional colorectal cancer associated markers as described herein.

[0149] Screening for Nucleic Acid Molecules

[0150] In one embodiment, the detection method of the present invention comprises determining whether a clinical sample from an individual contains mRNA of a colorectal cancer associated marker, preferably Reg1α or TIMP1, but also optionally including additional colorectal cancer associated markers as described herein. Techniques for determining the presence of a nucleic acid molecule of interest include Northern blot analysis, reverse transcription-polymerase chain reaction (RT-PCR), in situ hybridization, PCR, and quantitative amplification.

[0151] Prior to detection of target nucleic acid molecules in a clinical sample, it is preferred to first isolate the mRNA from the sample to facilitate detection of the target sequence (i.e., a sequence encoding Reg1α or TIMP1). Methods for isolation of mRNA from a biological sample are well known in the art. Briefly, where the sample is a serum sample, for example, 0.1 ml of 2 M sodium acetate, pH 4, 1 ml water-saturated phenol, and 0.2 ml of 49:1 chloroform/isoamyl alcohol are added to the serum sample sequentially. The sample is mixed after the addition of each component, and incubated for 15 min at 0-4° C. after all components have been added. The sample is separated by centrifugation for 20 min at 10,000×g, 4° C., precipitated by the addition of 1 ml of 100% isopropanol, incubated for 30 minutes at −20° C. and pelleted by centrifugation for 10 minutes at 10,000×g, 4° C. The resulting RNA pellet is dissolved in 0.3 ml denaturing solution, transferred to a microfuge tube, precipitated by the addition of 0.3 ml of 100% isopropanol for 30 minutes at −20° C., and centrifuged for 10 minutes at 10,000×g at 4° C. The RNA pellet is washed in 70% ethanol, dried, and resuspended in 100-200 μl DEPC-treated water or DEPC-treated 0.5% SDS (Chomczynski and Sacchi, 1987, Anal. Biochem., 162: 156).

[0152] Alternatively, total RNA may be extracted from a clinical sample according to the present invention using a commercially available RNA isolation reagent such as Trizol (Invitrogen, Carlsbad, Calif.), following the manufacturers instructions. Purity and integrity of RNA is assessed by absorbance at 260/280 nm and separation of RNA samples on a 1% agarose gel followed by inspection under ultraviolet light.

[0153] Following mRNA isolation, the mRNA may be reverse transcribed to provide a cDNA sample according to methods well known to those of skill in the art (see, e.g., Ausubel et al. (1995), Short Protocols in Molecular Biology, 3^{rd} Ed. John Wiley and Sons, Inc.)

[0154] Accordingly, in one aspect, the invention provides probes and primers that specifically hybridize to the Reg1α or TIMP1 nucleic acid sequences disclosed herein, or which can hybridize to a nucleic acid molecule encoding an additional colorectal cancer associated marker as described herein. Accordingly, the nucleic acid probes comprise a region of a nucleic acid sequence of SEQ ID Nos 1, 3, or 33 sufficient to hybridize with a nucleic acid substantially complementary to the sequence of SEQ ID Nos 1, 3 or 33. Preferred nucleic acid molecules for use as probes/primers can further comprise a region of nucleic acid sequence substantially complementary to the sequence of SEQ ID Nos. 1, 3 or 33 sufficient to hybridize with the sequence of SEQ ID Nos. 1, 3 or 33. In addition, nucleic acid sequences useful as probes/primers comprise a nucleotide sequence at least about 8 nucleotides in length, at least about 12 nucleotides in length, preferably at least about 15 nucleotides, more preferably about 25 nucleotides, and most preferably at least 40 nucleotides, and up to all or nearly all of the coding sequence which is complementary to a portion of the coding sequence of a marker nucleic acid sequence, which nucleic acid sequence is represented by SEQ ID Nos: 1, 3 or 33, or a sequence complementary thereto.

[0155] In one embodiment, the method comprises using a nucleic acid probe to determine the presence of a Reg1α or TIMP1 nucleic acid molecule in a clinical sample (such as a serum sample or a nucleic acid sample extracted therefrom). Specifically, the method comprises:

[0156] 1. Providing a nucleic acid probe comprising a nucleotide sequence at least about 8 nucleotides in length, at least about 12 nucleotides in length, preferably at least about 15 nucleotides, more preferably about 25 nucleotides, and most preferably at least about 40 nucleotides, and up to all or nearly all of the coding sequence which is complementary to a portion of the coding sequence of a nucleic acid sequence represented by SEQ ID Nos: 1, 3 or 33, or a sequence complementary thereto;

[0157] 2. Obtaining a clinical sample from a patient potentially comprising a Reg1α or TIMP1 nucleic acid sequence;

[0158] 3. Providing a second clinical sample from an individual known to not have colorectal cancer;

[0159] 4. Contacting the nucleic acid probe under stringent conditions with RNA of each of said first and second clinical samples (e.g., in a Northern blot or in situ hybridization assay); and

[0160] 5. Comparing (a) the amount of hybridization of the probe with RNA of the first serum sample, with (b) the amount of hybridization of the probe with RNA of the second clinical sample; wherein a statistically significant difference in the amount of hybridization with the RNA of the first clinical sample as compared to the amount of hybridization with the RNA of the second clinical sample is indicative of the presence of Reg1α or TIMP1 in the first clinical sample.

[0161] Although, primarily drawn to detection of Reg1α or TIMP1 in a clinical sample such as serum, in one aspect, the present invention provides a method comprising in situ hybridization detection of Reg1α or TIMP1 with a probe derived from a nucleic acid sequence represented by SEQ ID Nos: 1, 3 or 33, or a sequence complementary thereto. Preferably, the hybridization probe is detectably labeled. The method comprises contacting the labeled hybridization probe with a tissue or cell sample from an individual suspected of having colorectal cancer, washing off any unbound probe, and detecting the signal produced by the detectable label, wherein the detection of the detectable signal is indicative of the presence of Reg1α or TIMP1 in the sample, and thus permits the detection of colorectal cancer. Alternatively, the tissue or cell is additionally hybridized with a detectably labeled nucleic acid probe which is capable of specifically hybridizing with a nucleic acid sequence that encodes at least one additional colorectal cancer associated marker. Detection of the second detectably labeled probe is thus indicative of the presence of the additional colorectal cancer associated marker in the sample, and in conjunction with the detection of Reg1α or TIMP1, permits the detection of colorectal cancer in the individual. Specific methods for in situ hybridization are well known in the art.

[0162] Alternatively, methods such as PCR, Northern analysis, and Taqman may be used to detect and/or quantitate the expression of a nucleic acid sequence encoding Reg1α in a clinical sample. In one embodiment, reverse transcription PCR (RT-PCR) is performed using primers designed to specifically hybridize to a predetermined portion of the Reg1α mRNA sequence isolated from a clinical sample. Generation of a PCR product by such a reaction is thus indicative of the presence of the Reg1α or TIMP1 sequence in the sample. The technique of designing primers for PCR amplification is well known in the art. Oligonucleotide primers and probes are 5 to 100 nucleotides in length, ideally from 17 to 40 nucleotides, although primers and probes of different length are of use. Primers for amplification are preferably about 17-25 nucleotides. Primers useful according to the invention are also designed to have a particular melting temperature (Tm) by the method of melting temperature estimation. Commercial programs, including Oligo™ (MBI, Cascade, CO), Primer Design and programs available on the internet, including Primer3 and Oligo Calculator can be used to calculate a Tm of a nucleic acid sequence useful according to the invention. Preferably, the Tm of an amplification primer useful according to the invention, as calculated for example by Oligo Calculator, is preferably between about 45 and 65° C. and more preferably between about 50 and 60° C. Preferably, the Tm of a probe useful according to the invention is 7° C. higher than the Tm of the corresponding amplification primers. It is preferred that, following generation of cDNA by RT-PCR, the cDNA fragment is cloned into an appropriate sequencing vector, such as a PCRII vector (TA cloning kit; Invitrogen). The identity of each cloned fragment is then confirmed by sequencing in both directions. It is expected that the sequence obtained from sequencing would be the same as the known sequence of Reg1α to TIMP1 as described herein.

[0163] Alternatively, the presence of an mRNA sequence encoding Reg1α or TIMP1 may be detected by Northern analysis. Sequence confirmed cDNAs, that is, cDNAs encoding Reg1α or TIMP1 (or alternatively an additional colorectal cancer associated marker) are used to produce ³²P-labeled cDNA probes using techniques well known in the art (see, for example, Ausubel, supra). Labeled probes for Northern analysis may also be produced using commercially available kits (Prime-It Kit, Stratagene, La Jolla, Calif.). Northern analysis of total RNA obtained from a clinical sample may be performed using classically described techniques. For example, total RNA samples are denatured with formaldehyde/formamide and run for two hours in a 1% agarose, MOPS-acetate-EDTA gel. RNA is then transferred to nitrocellulose membrane by upward capillary action and fixed by UV cross-linkage. Membranes are pre-hybridized for at least 90 minutes and hybridized overnight at 42° C. Post hybridization washes are performed as known in the art (Ausubel, supra). The membrane is then exposed to x-ray film overnight with an intensifying screen at −80° C. Labeled membranes are then visualized after exposure to film. The signal produced on the x-ray film by the radiolabeled cDNA probes can then be quantified using any technique known in the art, such as scanning the film and quantifying the relative pixel intensity using a computer program such as NIH Image (National Institutes of Health, Bethesda, Md.), wherein the detection of hybridization of a Reg1α-specific probe to the clinical sample is indicative of the presence of Reg1α or TIMP1 and thus may be used to detect colorectal cancer.

[0164] In an alternate embodiment, the presence and optionally the quantity of Reg1α or TIMP1 in a clinical sample may be determined using the Taqman™ (Perkin-Elmer, Foster City, Calif.) technique, which is performed with a transcript-specific antisense probe (i.e., a probe capable of specifically hybridizing to Reg1α). This probe is specific for a Reg1α or TIMP1 PCR product and is prepared with a quencher and fluorescent reporter probe complexed to the 5′ end of the oligonucleotide. Different fluorescent markers can be attached to different reporters, allowing for measurement of two products in one reaction (e.g., measurement of Reg1α or TIMP1 and at least one additional colorectal cancer associated marker). When Taq DNA polymerase is activated, it cleaves off the fluorescent reporters by its 5′-to-3′ nucleolytic activity. The reporters, now free of the quenchers, fluoresce. The color change is proportional to the amount of each specific product and is measured by fluorometer; therefore, the amount of each color can be measured and the RT-PCR product can be quantified. The PCR reactions can be performed in 96 well plates so that samples derived from many individuals can be processed and measured simultaneously. The Taqman™ system has the additional advantage of not requiring gel electrophoresis and allows for quantification when used with a standard curve.

[0165] Screening for Polypeptide Molecules

[0166] The Reg1α- or TIMP1-specific and colorectal cancer marker-specific antibodies described above may be used to detect the presence of Reg1α or TIMP1 or an additional colorectal cancer associated marker in a clinical sample by any method known in the art. The immunoassays which can be used include but are not limited to competitive and non-competitive assay systems using techniques such as western blots, radioimmunoassays, ELISA (enzyme linked immunosorbent assay), “sandwich” immunoassays, immunoprecipitation assays, precipitation reactions, gel diffusion precipitin reactions, immunodiffusion assays, agglutination assays, complement-fixation assays, immunoradiometric assays, fluorescent immunoassays, protein A immunoassays, to name but a few. Such assays are routine and well known in the art (see, e.g., Ausubel et al, eds, 1994, Current Protocols in Molecular Biology, Vol. 1, John Wiley & Sons, Inc., New York, which is incorporated by reference herein in its entirety). Exemplary immunoassays are described briefly below (but are not intended by way of limitation).

[0167] Immunoprecipitation protocols generally comprise lysing a population of cells in a lysis buffer such as RIPA buffer (1% NP-40 or Triton X-100,1% sodium deoxycholate, 0.1% SDS, 0.15 M NaCl, 0.01 M sodium phosphate at pH 7.2, 1% Trasylol) supplemented with protein phosphatase and/or protease inhibitors (e.g., EDTA, PMSF, aprotinin, sodium vanadate), adding the antibody of interest to the cell lysate, incubating for a period of time (e. g., 1-4 hours) at 4 C, adding protein A and/or protein G sepharose beads to the cell lysate, incubating for about an hour or more at 4 C, washing the beads in lysis buffer and resuspending the beads in SDS/sample buffer. In the case of immunonprecipitation of a serum sample, however the above protocol is carried out absent the cell lysis step. The ability of the antibody to immunoprecipitate Reg1α or TIMP1 (or other colorectal cancer marker) antigen can be assessed by, e.g., western blot analysis. The parameters that can be modified to increase the binding of the antibody to an antigen and decrease the background (e.g., preclearing the cell lysate with sepharose beads) are well known to those of skill in the art (Ausubel et al, supra).

[0168] Reg1α or TIMP1 polypeptides, and optionally one or more additional colorectal cancer associated markers may be detected in a patient clinical sample using Western blot analysis. Briefly, Western blot analysis comprises preparing protein samples, electrophoresis of the protein samples in a polyacrylamide gel (e.g., 8%-20% SDS-PAGE), transferring the protein sample from the polyacrylamide gel to a membrane such as nitrocellulose, PVDF or nylon, blocking the membrane in blocking solution (e.g., PBS with 3% BSA or non-fat milk), washing the membrane in washing buffer (e.g., PBS-Tween 20), blocking the membrane with primary antibody (the antibody of interest) diluted in blocking buffer, washing the membrane in washing buffer, blocking the membrane with a secondary antibody (which recognizes the primary antibody, e.g., an antihuman antibody) conjugated to an enzymatic substrate (e.g., horseradish peroxidase or alkaline phosphatase) or radioactive molecule (e.g., 32P or 125I) diluted in blocking buffer, washing the membrane in wash buffer, and detecting the presence of the antigen. Methods for the optimization of such an analysis are well known in the art (Ausubel, et al., supra).

[0169] Alternatively, the presence of Reg1α or TIMP1 and optionally one or more additional colorectal cancer associated markers in a clinical sample may be detected by ELISA. ELISAs comprise preparing antigen, coating the well of a 96 well microtiter plate (or other suitable container) with the antigen, adding the antibody of interest conjugated to a detectable compound such as an enzymatic substrate (e.g., horseradish peroxidase or alkaline phosphatase) to the well and incubating for a period of time, and detecting the presence of the antigen. In ELISAs the antibody of interest does not have to be conjugated to a detectable compound; instead, a second antibody (which recognizes the antibody of interest, that is, the antibody which will bind to Reg1α or TIMP1 or a second colorectal cancer associated marker) conjugated to a detectable compound may be added to the well. Further, instead of coating the well with the antigen, the antibody may be coated to the well. In this case, a second antibody conjugated to a detectable compound may be added following the addition of the antigen of interest to the coated well. This method may be modified or optimized according techniques which are known to those of skill in the art.

[0170] The binding affinity of an antibody to an antigen and the off-rate of an antibody antigen interaction can be determined by competitive binding assays. One example of such an assay is a radioimmunoassay comprising the incubation of labeled antigen (e.g., Reg1α labeled with 3H or 125I) with an anti-Reg1α or TIMP1 antibody in the presence of increasing amounts of unlabeled antigen, and the detection of the antibody bound to the labeled antigen. The affinity of the antibody of interest for a particular antigen and the binding off-rates can be determined from the data by scatchard plot analysis. Competition with a second antibody can also be determined using radioimmunoassays. In this case, the antigen is incubated with antibody of interest conjugated to a labeled compound (e.g., 3H or 125I) in the presence of increasing amounts of an unlabeled second antibody.

[0171] Preferably, the above detection assays re be carried out using antibodies to detect the protein product encoded by a nucleic acid having the sequence of SEQ ID Nos: 1, 3 or 33, or a sequence complementary thereto. Preferably, the protein product has the sequence of one or more of SEQ ID Nos. 2, 4, or 100. In addition, the above detection assays may be conducted using one or more antibodies which specifically recognize and bind to at least one additional colorectal cancer associated marker. Accordingly, in one embodiment, the assay would include contacting the proteins of the test cell with an antibody specific for the gene product of a nucleic acid represented by SEQ ID Nos: 1, 3 or 33, or a sequence complementary thereto, and determining the approximate amount of immunocomplex formation by the antibody and the proteins of the test cell, wherein a detection of such an immunocomplex is indicative of the presence of the antigen, and thus, permits the detection of colorectal cancer.

[0172] Immunoassays, useful in the present invention include those described above, and can also include both homogeneous and heterogeneous procedures such as fluorescence polarization immunoassay (FPIA), fluorescence immunoassay (FIA), enzyme immunoassay (EIA), and nephelometric inhibition immunoassay (NIA).

[0173] In another embodiment, the level of the encoded product, i.e., the product encoded by SEQ ID Nos 1, 3 or 33, or a sequence complementary thereto, in a biological fluid (e.g., blood or urine) of a patient may be determined as a way of monitoring the level of expression of the marker nucleic acid sequence in cells of that patient. Such a method would include the steps of obtaining a sample of a biological fluid from the patient, contacting the sample (or proteins from the sample) with an antibody specific for a encoded marker polypeptide, and determining the amount of immune complex formation by the antibody, with the amount of immune complex formation being indicative of the level of the marker encoded product in the sample. This determination is particularly instructive when compared to the amount of immune complex formation by the same antibody in a control sample taken from a normal individual or in one or more samples previously or subsequently obtained from the same person.

[0174] In another embodiment, the method can be used to determine the amount of marker polypeptide present in a cell, which in turn can be correlated with progression of a hyperproliferative disorder, e.g., colorectal cancer. The level of the marker polypeptide can be used predictively to evaluate whether a sample of cells contains cells which are, or are predisposed towards becoming, transformed cells. Moreover, the subject method can be used to assess the phenotype of cells which are known to be transformed, the phenotyping results being useful in planning a particular therapeutic regimen. For instance, very high levels of the marker polypeptide in sample cells is a powerful diagnostic and prognostic marker for a cancer, such as colorectal cancer. The observation of marker polypeptide level can be utilized in decisions regarding, e.g., the use of more aggressive therapies.

[0175] As set out above, one aspect of the present invention relates to detection assays for determining, in the context of cells isolated from a patient, if the level of a marker polypeptide is significantly reduced in the sample cells. The term “significantly reduced” refers to a cell phenotype wherein the cell possesses a reduced cellular amount of the marker polypeptide relative to a normal cell of similar tissue origin. For example, a cell may have less than about 50%, 25%, 10%, or 5% of the marker polypeptide that a normal control cell. In particular, the assay evaluates the level of marker polypeptide in the test cells, and, preferably, compares the measured level with marker polypeptide detected in at least one control cell, e.g., a normal cell and/or a transformed cell of known phenotype.

[0176] Of particular importance to the subject invention is the ability to quantitate the level of normal or abnormal Reg1α or TIMP1 expression. The expression of Reg1α or TIMP1, and/or the level of expression of Reg1α or TIMP1 can be used predictively to evaluate whether a patient is predisposed towards developing colorectal cancer, or for determining the severity of colorectal cancer.

[0177] In one embodiment, tissue samples may be used to measure Reg1α or TIMP1 expression by immunohistochemical staining which may be used to determine the number of cells (i.e., colon cells) expressing Reg1α or TIMP1. For such staining, a multiblock of tissue is taken from the biopsy or other tissue sample and subjected to proteolytic hydrolysis, employing such agents as protease K or pepsin. In certain embodiments, it may be desirable to isolate a nuclear fraction from the sample cells and detect the level of the marker polypeptide in the nuclear fraction.

[0178] The tissue samples are fixed by treatment with a reagent such as formalin, glutaraldehyde, methanol, or the like. The samples are then incubated with an antibody, preferably a monoclonal antibody, with binding specificity for Reg1α or TIMP1 and optionally an additional colorectal cancer associated marker. This antibody may be conjugated to a label for subsequent detection of binding. Samples are incubated for a time sufficient for formation of the immunocomplexes. Binding of the antibody is then detected by virtue of a label conjugated to this antibody. Where the antibody is unlabeled, a second labeled antibody may be employed, e.g., which is specific for the isotype of the anti-marker polypeptide antibody. Examples of labels which may be employed include radionuclides, fluorescers, chemiluniinescers, enzymes and the like.

[0179] Where enzymes are employed, the substrate for the enzyme may be added to the samples to provide a colored or fluorescent product. Examples of suitable enzymes for use in conjugates include horseradish peroxidase, alkaline phosphatase, malate dehydrogenase and the like. Where not commercially available, such antibody-enzyme conjugates are readily produced by techniques known to those skilled in the art. Other assays, known to those of skill in the art for determining the presence and/or quantity of a polypeptide in a sample (either serum or tissue) are also encompassed by the present invention.

[0180] Drug Screening

[0181] Several in vivo methods can be used to identify compounds that modulate expression of Reg1α or TIMP1 nucleic acids (SEQ ID Nos: 1, 3 or 33, or a sequence complementary thereto) and/or alter for example, inhibit the bioactivity of the encoded polypeptide (e.g., SEQ ID Nos: 2, 4, or 100).

[0182] Drug screening is performed by adding a test compound to a sample of cells, and monitoring the effect. A parallel sample which does not receive the test compound is also monitored as a control. The treated and untreated cells are then compared by any suitable phenotypic criteria, including but not limited to microscopic analysis, viability testing, ability to replicate, histological examination, the level of a particular RNA or polypeptide associated with the cells, the level of enzymatic activity expressed by the cells or cell lysates, and the ability of the cells to interact with other cells or compounds. Differences between treated and untreated cells indicates effects attributable to the test compound.

[0183] Desirable effects of a test compound include an effect on any phenotype that was conferred by the cancer-associated marker nucleic acid sequence. Examples include a test compound that limits the overabundance of mRNA, limits production of the encoded protein, or limits the functional effect of the protein. The effect of the test compound would be apparent when comparing results between treated and untreated cells.

[0184] The invention thus also encompasses methods of screening for agents which inhibit expression of Reg1α or TIMP1 nucleic acid (SEQ ID Nos: 1, 3 or 33, or a sequence complementary thereto) in vitro, comprising exposing either a cell or tissue in which Reg1α or TIMP1 nucleic acid mRNA is detectable or cultured cells comprising and capable of expressing Reg1α or TIMP1 nucleic acid to an agent in order to determine whether the agent is capable of inhibiting production of the mRNA; and determining the level of mRNA in the exposed cells or tissue, wherein a decrease in the level of the mRNA after exposure of the cell line to the agent is indicative of inhibition of the marker nucleic acid mRNA production.

[0185] Alternatively, the screening method may include in vitro screening of a cell or tissue in which Reg1α or TIMP1 is detectable, or cultured cells which express Reg1α or TIMP1, to an agent suspected of inhibiting production of Reg1α or TIMP1 protein; and determining the level of the Reg1α or TIMP1 protein in the cells or tissue, wherein a decrease in the level of marker protein after exposure of the cells or tissue to the agent is indicative of inhibition of marker protein production.

[0186] The invention also encompasses in vivo methods of screening for agents which inhibit expression of the marker nucleic acids, comprising exposing a mammal having tumor cells or serum in which Reg1α or TIMP1 mRNA or protein is detectable to an agent suspected of inhibiting production of marker mRNA or protein; and determining the level of marker mRNA or protein in serum or tumor cells of the exposed mammal. A decrease in the level of marker mRNA or protein after exposure of the mammal to the agent is indicative of inhibition of marker nucleic acid expression. Optionally, the effect of the candidate agent on the expression of at least one additional colorectal cancer associated marker may also be determined.

[0187] Accordingly, the invention provides a method comprising incubating a cell expressing the marker nucleic acids (SEQ ID Nos: 1, 3 or 33, or a sequence complementary thereto) with a test compound and measuring the mRNA or protein level. The invention further provides a method for quantitatively determining the level of expression of the marker nucleic acids in a cell population or clinical sample, and a method for determining whether an agent is capable of increasing or decreasing the level of expression of the Reg1α or TIMP1 nucleic acid in a cell population or clinical sample. The method for determining whether an agent is capable of increasing or decreasing the level of expression of Reg1α or TIMP1 nucleic acid in a cell population comprises the steps of (a) preparing cell extracts from control and agent-treated cell populations, (b) isolating the Reg1α or TIMP1 polypeptide from the cell extracts, (c) quantifying (e.g., in parallel) the amount of an immunocomplex formed between Reg1α or TIMP1 polypeptide and an antibody specific to said polypeptide. The Reg1α or TIMP1 polypeptide of this invention may also be quantified by assaying for its bioactivity. Agents that induce an increase in Reg1α or TIMP1 nucleic acid expression may be identified by their ability to increase the amount of immunocomplex formed in the treated cell as compared with the amount of the immunocomplex formed in the control cell. In a similar manner, agents that decrease expression of Reg1α or TIMP1 nucleic acid may be identified by their ability to decrease the amount of the immunocomplex formed in the treated cell extract as compared to the control cell.

[0188] mRNA levels can be determined by Northern blot hybridization. mRNA levels can also be determined by methods involving PCR. Other sensitive methods for measuring mRNA, which can be used in high throughput assays, e.g., a method using a DELFIA endpoint detection and quantification method, are described, e.g., in Webb and Hurskainen (1996) Journal of Biomolecular Screening 1:119. Reg1α protein levels can be determined by immunoprecipitations or immunohistochemistiy using an antibody that specifically recognizes the protein product of SEQ ID Nos: 2, 4, or 100.

[0189] Agents that are identified as active in the drug screening assay are candidates to be tested for their capacity to block cell proliferation activity. These agents would be useful for treating a disorder involving aberrant growth of cells, especially colon cells, especially colorectal cancer.

[0190] A variety of assay formats will suffice and, in light of the present disclosure, those not expressly described herein will nevertheless be comprehended by one of ordinary skill in the art. For instance, the assay can be generated in many different formats, and include assays based on cell-free systems, e.g., purified proteins or cell lysates, as well as cell-based assays which utilize intact cells.

[0191] In many drug screening programs which test libraries of compounds and natural extracts, high throughput assays are desirable in order to maximize the number of compounds surveyed in a given period of time. Assays of the present invention which are performed in cell-free systems, such as may be derived with purified or semi-purified proteins or with lysates, or with proteins purified or semi-purified from serum, are often preferred as “primary” screens in that they can be generated to permit rapid development and relatively easy detection of an alteration in a molecular target which is mediated by a test compound. Moreover, the effects of cellular toxicity and/or bioavailability of the test compound can be generally ignored in the in vitro system, the assay instead being focused primarily on the effect of the drug on the molecular target as may be manifest in an alteration of binding affinity with other proteins or changes in enzymatic properties of the molecular target.

### EXAMPLES

[0192] The examples below are non-limiting and are merely representative of various aspects and features of the present invention.

### Example 1

### Generation of anti-Reg1α Antibodies

[0193] To generate antibodies to Reg1α, the full-length open reading frame of Reg1α (shown in either SEQ ID NO: 1 or 3) was directionally cloned into a mammalian expression vector, such as pcDNA3.1N5-His (Invitrogen), which includes C-terminal epitope and purification tags. The insert sequence was verified by dideoxy sequencing (see, for example, Ausubel et al., Current Protocols in Molecular Biology, John Wiley and Sons). Recombinant fusion protein was produced in a transient expression system in mammalian cells (e.g. CHO cells). The recombinant protein was purified from the cell culture supernatants by immobilized metal affinity chromatography (IMAC) by utilizing the C terminal His-tag. The sequence of the Reg1α protein used for the production of antibodies of the present invention is shown in either of SEQ ID Nos 2 or 4, all of which represent a functional Reg1α protein, and which are encoded by SEQ ID Nos 1 or 3, respectively. The purified, recombinant Reg1α protein was emulsified in Freund's adjuvant and injected into rabbits. The animals were periodically boosted until they elicited a reasonable serum titer of specific antibody to Reg1a. Methods for antibody production are well known to those of skill in the art and may be found, for example, in Harlow et al. Antibodies: A laboratory manual, 1988, Cold Spring Harbor Laboratory. The polyclonal antibodies, which recognized both native and denatured Reg1α, were utilized to develop a microtiter-based ELISA assay. Methods of performing an ELISA assay are well known to those of skill in the art (see, for example, Asusbel et al., supra).

### Example 2

### Detection of Reg1α in Colorectal Cancer Patient Serum Samples

[0194] The present invention relates to a method for the detection of colorectal cancer in an individual, which method includes the detection of Reg1α polypeptides in a serum sample from an individual with colorectal cancer, wherein the detection of Reg1α is indicative of the presence of colorectal cancer. Accordingly, Reg1α expression was measured in serum samples obtained from patients having been diagnosed with colorectal cancer.

[0195] All patients used in this study were diagnosed at their respective medical institutions by qualified physicians using conventional diagnostic means, including physical exam, blood analysis, imaging, and endoscopy. Once identified, patients provided informed consent through an IRB approved protocol. The severity of colorectal cancer in each patient was graded using the Dukes staging scheme. Serum samples were subsequently collected from each patient using methods known to those of skill in the art. Samples were subsequently assessed for the presence of Reg1α by the ELISA assay described above. FIG. 1 shows the levels of Reg1α protein measured in the colorectal cancer patients compared to samples obtained from naïve patients and additional patients diagnosed with either inflammatory bowel disease (IBD) or cirrhosis of the liver. FIG. 2 shows the levels of Reg1α expression in the colorectal cancer patients of FIG. 1, identified at each stage of colorectal cancer severity. As can be seen in FIGS. 1 and 2, Reg1α expression is clearly elevated in serum samples obtained from patients diagnosed with colorectal cancer, and therefore may be used to detect the presence of colorectal cancer in a patient.

### Example 3

### Detection of Reg1α Nucleic Acid Sequence in Colorectal Cancer

[0196] In one embodiment, the present invention provides for a method of detecting the presence of colorectal cancer in a patient by detecting the presence of nucleic acid molecules encoding Reg1α in a serum sample obtained from a patient.

[0197] Serum may be obtained from a patient suspected of having colorectal cancer by methods described above and known to those of skill in the art. Nucleic acid molecules encoding Reg1α may be detected, for example, by Northern analysis. Briefly, probes for detection of Reg1α mRNA in a patient sample are derived by amplifying the Reg1α coding sequence by RT-PCR according to techniques known in the art. The cDNA fragments generated in this manner are subsequently cloned into a PCRII vector using the TA cloning kit (Invitrogen). The identity of each fragment can be verified by sequencing in each direction from the T3 and T7 polymerase sites present in the cloning vector. The cDNA molecules produced in this manner are then used to produce ³²P-labeled Reg1α cDNA probes using, for example, the Prime-It kit from Stratagene. Subsequently, 5 to 10 μg of total RNA isolated the serum of a patient suspected of having colorectal cancer is separated on an agarose/formaldehyde gel in 1×MOPS buffer. Methods of isolating RNA from a patient sample such as serum are well known in the art (see, for example, Ausubel et al., supra). Following staining with ethidium bromide and visualization under ultra violet light to determine the integrity of the RNA, the RNA is hydrolyzed by treatment with 0.05M NaOH/1.5MNaCl followed by incubation with 0.5M Tris-Cl (pH 7.4)/1.5M NaCl. The RNA is transferred to a commercially available nylon or nitrocellulose membrane (e.g. Hybond-N membrane, Amersham, Arlington Heights, Ill.) by methods well known in the art (Ausubel et al., supra, Sambrook et al., supra). Following transfer and UV cross linking, the membrane is hybridized with a ³²P-labeled Reg1α cDNA probe in hybridization solution (e.g. in 50% formamide/2.5% Denhardt's/100-200 mg denatured salmon sperm DNA/0.1% SDS/5×SSPE) overnight at 65° C. The hybridization conditions can be varied as necessary as described in Ausubel et al., supra and Sambrook et al., supra. Following hybridization, the membrane is washed at room temperature in 2×SSC/0.1% SDS, at 42° C. in 1×SSC/0.1% SDS, at 65° C. in 0.2×SSC/0.1% SDS, and exposed to film overnight with an intensifying screen at −80° C. The stringency of the wash buffers can also be varied depending on the amount of background signal (Ausubel et al., supra). The film is subsequently developed and the intensity bands corresponding to the radiolabeled probe hybridized to RNA are quantified using methods known to those of skill in the art, for example, by digitizing the film and analyzing the band intensity with a computer software program such as NIH Image (NIH, Bethesda, Md.).

[0198] Alternatively, Reg1α mRNA may be detected in a patient sample by real-time amplification using oligonucleotide primers capable of specifically hybridizing to the Reg1α a sequence. For example, real-time PCR and TaqMan® probes may be used to detect and quantitate the presence of Reg1α mRNA in a patient sample. The technique of real-time PCR is well known in the art (see, for example, U.S. Pat. Nos. 5,691,146; 5,779,977; 5,866,336; and 5,914,230). Methods of designing primers useful for the amplification of Reg1α sequences are well known in the art (see, for example, Ausubel et al., supra)

[0199] cDNA samples, reverse transcribed from mRNA obtained from patient serum samples may be used to generate PCR products via an ABI 7700 sequence detection system (Applied Biosystems, Foster City, Calif.). A measurement may then be made of the level of expression of Reg1α in the patient sample to determine if Reg1α mRNA levels are elevated, thus, providing a means for the detection of colorectal cancer in the patient.

### Example 4

### Detection of Reg1α in Other Patient Samples

[0200] In one embodiment of the present invention, colorectal cancer may be detected in a patient by detecting the expression of Reg1α in a clinical patient sample, which is not a serum sample. For example, a circulating cell sample may be obtained from a patient by collecting a sample such as blood, stool, or other bodily fluid. The sample is then subsequently treated to lyse the cells present therein, for example by treating the sample with a suitable lysis buffer, such as a buffer containing 30 mM Tris-Cl, pH 7.4, 100 mM NaCl, 5 mM EDTA, 1% (w/v) SDS, and 100 μg/ml proteinase K (for isolation of nucleic acid). The resulting sample is then analyzed for Reg1α expression either by isolating total RNA from the sample, as described above, and in Ausubel et al., supra, or the sample may be separated on a polyacrylamide gel for analysis by Western blot, or may be utilized in an ELISA-based assay as described above in Example 2.

### Example 5

### Detection of TIMP1 in Patient Serum Samples

[0201] The present invention provides for the detection and monitoring of colorectal cancer in a patient by measuring the level of TIMP1 polypeptide in a patient sample, preferably in a plasma sample. TIMP1 expression was determined in 63 samples from patients diagnosed with colorectal cancer relative to the expression level of TIMP1 in 35 healthy individuals. The results demonstrate that TIMP1, in addition to one or more other colorectal cancer associated markers is overexpressed in colorectal cancer samples relative to normal samples, thus indicating that TIMP1 is a valuable marker for the detection of colorectal cancer in a patient (FIG. 3).

[0202] To assess TIMP1 polypeptide expression levels, 63 pre-treatment plasma samples from patients with colorectal cancer, and 35 samples from healthy donors were tested in either commercially available ELISAs (Osteopontin), ADVIA Centaur Immunoassays (CEA and Ferritin), or in-house developed ELISA (TIMP1). All patients used in this study were diagnosed at their respective medical institutions by qualified physicians using conventional diagnostic means, including physical exam, blood analysis, imaging, or endoscopy. Once identified, patients provided informed consent through an IRB approved protocol. The extent of colorectal cancer in each patient was determined using the Dukes' staging scheme. Serum and plasma samples were subsequently collected from each patient using methods known to those of skill in the art.

[0203] Specificity at appropriate cutoff values was determined for each marker (e.g., TIMP1, osteopontin, CEA, and ferritin) by evaluating the normal samples. For example, the 100% specificity cutoff for any given marker is equal to the marker value of the highest normal sample. Using these values as the cutoffs, the levels of each marker in the 63 cancer samples were compared to their own respective cutoff values. If the level in the cancer sample was higher than the determined cutoff value, the sample was deemed “positive” and is represented by a shaded box (FIG. 3). This same process was repeated at 97% specificity (using the second highest normal; e.g., 34 of the 35 samples were equal to or below this value). The overall specificity level for the entire panel is calculated by multiplying the specificity of each marker in the panel (e.g., 97%×97%×97%×97%=89% specificity for the panel). The markers were arranged on the graphs shown in FIG. 3, according to the frequency of their overexpression in the cancer samples (TIMP1 was overexpressed in the highest number of cancer patients and is therefore listed first). The marker adding the most to the sensitivity of TIMP1 is ranked second. For example, the 57% sensitivity/100% specificity graph shows that TIMP1 was elevated in 19 of the 63 colorectal cancer patient plasma samples, and is thus listed first on the graph. Evaluating the samples for osteopontin yielded seven additional positive patient samples, and osteopontin is thus listed second on the graph.

[0204] The sensitivity of the panel was determined by dividing the cumulative number of samples that were positive for at least one marker by the total number of cancer samples (63).

### Other Embodiments

[0205] Other embodiments will be evident to those of skill in the art. It should be understood that the foregoing detailed description is provided for clarity only and is merely exemplary. The spirit and scope of the present invention are not limited to the above examples, but are encompassed by the following claims.

1. A method of diagnosing colon cancer in an individual comprising:
(a) obtaining a serum sample from said individual; and
(b) detecting the presence of TIMP1 in said sample, wherein the presence of Reg1α in said sample is indicative of colon cancer in said individual.

2. The method of claim 1, wherein said step of detecting comprises:
(a) contacting said serum sample with a polypeptide ligand which is capable of binding to TIMP1 under conditions which permit said polypeptide ligand to bind to TIMP1; and
(b) detecting the binding of said polypeptide ligand to TIMP1, wherein detection of binding is indicative of the presence of TIMP1 in said sample.

3. The method of claim 2, wherein said polypeptide ligand is an antibody.

4. The method of claim 2, wherein said polypeptide ligand comprises a detectable label.

5. The method of claim 1, wherein said individual is a human.

6. A method of diagnosing colon cancer in an individual comprising:
(a) obtaining a serum sample from said individual; and
(b) detecting the presence of TIMP1 and at least one other colon cancer specific marker in said sample, wherein the presence of TIMP1 and said at least one other colon cancer-specific marker is indicative of colon cancer in said individual.

7. The method of claim 6, wherein said colon cancer-specific marker is selected from the group consisting of the nucleic acid molecules of SEQ ID Nos 1, 3, 5-71, the polypeptide molecules of SEQ ID Nos 2, 4, 72-138, CA 19-9, CA 72-4, TF, sTn, Tn, CA 50, CA 549, CA 242, LASA, and Du-PAN 1-5.

8. The method of claim 6, wherein said step of detecting comprises:
(a) contacting said serum sample with a first polypeptide ligand which is capable of binding to TIMP1 and a second polypeptide ligand which is capable of binding to said colon cancer-specific marker, under conditions which permit said first and second polypeptide ligands to bind to TIMP1 and said colon cancer-specific marker, respectively; and
(b) detecting the binding of said first polypeptide ligand to TIMP1 and said second polypeptide ligand to said colon cancer-specific marker, wherein detection of binding is indicative of the presence of TIMP1 and said colon cancer-specific marker in said sample.

9. The method of claim 8, wherein said first and second polypeptide ligand are each an antibody.

10. The method of claim 8, wherein said first and second polypeptide ligand comprises a detectable label.

11. The method of claim 6, wherein said individual is a human.

12. A method of diagnosing colon cancer in an individual comprising:
(a) obtaining a serum sample from an individual; and
(b) detecting the presence of a nucleic acid molecule which encodes TIMP1 in said sample, wherein the presence of TIMP1 of said nucleic acid molecule in said sample is indicative of colon cancer in said individual.

13. A method of diagnosing colon cancer in an individual comprising:
(a) obtaining a serum sample from an individual; and
(b) detecting the presence of a nucleic acid molecule which encodes TIMP1 and at least one other nucleic acid molecule which encodes at least one other colon cancer-specific marker in said sample, wherein the presence of said nucleic acid sequence encoding TIMP1 and said nucleic acid sequence encoding said at least one other colon cancer-specific marker is indicative of colon cancer in said individual.

14. The method of claim 13, wherein said colon cancer specific marker is selected from the group consisting of SEQ ID Nos 1, 3, 5-71, the polypeptide molecules of SEQ ID Nos 2, 4, 72-138, CA 19-9, CA 72-4, TF, sTn, Tn, CA 50, CA 549, CA 242, LASA, and Du-PAN 1-5.

15. A method of diagnosing colon cancer in an individual comprising:
(a) obtaining a serum sample from said individual; and
(b) detecting the presence of Reg1α in said sample, wherein the presence of Reg1α in said sample is indicative of colon cancer in said individual.

16. The method of claim 15, wherein said step of detecting comprises:
(a) contacting said serum sample with a polypeptide ligand which is capable of binding to Reg1α under conditions which permit said polypeptide ligand to bind to Reg1α; and
(b) detecting the binding of said polypeptide ligand to Reg1α, wherein detection of binding is indicative of the presence of Reg1α in said sample.

17. The method of claim 16, wherein said polypeptide ligand is an antibody.

18. The method of claim 16, wherein said polypeptide ligand comprises a detectable label.

19. The method of claim 15, wherein said individual is a human.

20. A method of diagnosing colon cancer in an individual comprising:
(a) obtaining a serum sample from said individual; and
(b) detecting the presence of Reg1α and at least one other colon cancer specific marker in said sample, wherein the presence of Reg1α and said at least one other colon cancer-specific marker is indicative of colon cancer in said individual.

21. The method of claim 20, wherein said colon cancer-specific marker is selected from the group consisting of the nucleic acid molecules of SEQ ID Nos 1, 3, 5-71, the polypeptide molecules of SEQ ID Nos 2, 4, 72-138, CA 19-9, CA 72-4, TF, sTn, Tn, CA 50, CA 549, CA 242, LASA, and Du-PAN 1-5.

22. The method of claim 20, wherein said step of detecting comprises:
(a) contacting said serum sample with a first polypeptide ligand which is capable of binding to Reg1α and a second polypeptide ligand which is capable of binding to said colon cancer-specific marker, under conditions which permit said first and second polypeptide ligands to bind to Reg1α and said colon cancer-specific marker, respectively; and
(b) detecting the binding of said first polypeptide ligand to Reg1α and said second polypeptide ligand to said colon cancer-specific marker, wherein detection of binding is indicative of the presence of Reg1α and said colon cancer-specific marker in said sample.

23. The method of claim 22, wherein said first and second polypeptide ligand are each an antibody.

24. The method of claim 22, wherein said first and second polypeptide ligand comprises a detectable label.

25. The method of claim 20, wherein said individual is a human.

26. A method of diagnosing colon cancer in an individual comprising:
(a) obtaining a serum sample from an individual; and
(b) detecting the presence of a nucleic acid molecule which encodes Reg1α in said sample, wherein the presence of Reg1α of said nucleic acid molecule in said sample is indicative of colon cancer in said individual.

27. A method of diagnosing colon cancer in an individual comprising:
(a) obtaining a serum sample from an individual; and
(b) detecting the presence of a nucleic acid molecule which encodes Reg1α and at least one other nucleic acid molecule which encodes at least one other colon cancer-specific marker in said sample, wherein the presence of said nucleic acid sequence encoding Reg1α and said nucleic acid sequence encoding said at least one other colon cancer-specific marker is indicative of colon cancer in said individual.

28. The method of claim 27, wherein said colon cancer specific marker is selected from the group consisting of SEQ ID Nos 1, 3, 5-71, the polypeptide molecules of SEQ ID Nos 2, 4, 72-138, CA 19-9, CA 72-4, TF, sTn, Tn, CA 50, CA 549, CA 242, LASA, and Du-PAN 1-5.

The application's sequence listing, which the Patent Office published only in electronic form, follows.

SEQUENCE LISTING (138 sequences)

SEQ ID NO: 1 - DNA, 777 bp, Homo sapiens
ttcttcaaaccctcctcttccctgtgttctcctacagagattgctgatttctccttaagcaagagattcactgccgctaagcatggctcagaccaactcgttcttcatgctgatctcctccctgatgttcctgtctctgagccaaggccaagaggcccagacagagttgccccaggcccggatcagctgcccagaaggcaccaatgcctatcgctcctactgctactactttaatgaagaccgtgagacctgggttgatgcagatctctattgccagaacatgaattcgggcaacctggtgtctgtgctcacccaggccgagggtgcctttgtggcctcactgattaaggagagtggcactgatgacttcaatgtctggattggcctccatgaccccaaaaagaaccgccgctggcactggagcagtgggtccctggtctcctacaagtcctggggcattggagccccaagcagtgttaatcctggctactgtgtgagcctgacctcaagcacaggattccagaaatggaaggatgtgccttgtgaagacaagttctcctttgtatgcaagttcaaaaactagaggcagctggaaaatacatgtctagaactgatccagcaattacaacggagtcaaaaattaaaccggaccatctctccaactcaactcaacctggacactctcttctctgctgagtttgccttgttaatcttcaatagttttacctaccccagtctttggaaccctaaataataaaaataaacatgttttccact

SEQ ID NO: 2 - protein, 166 aa, Homo sapiens
MAQTNSFFMLISSLMFLSLSQGQEAQTELPQARISCPEGTNAYRSYCYYFNEDRETWVDADLYCQNMNSGNLVSVLTQAEGAFVASLIKESGTDDFNVWIGLHDPKKNRRWHWSSGSLVSYKSWGIGAPSSVNPGYCVSLTSSTGFQKWKDVPCEDKFSFVCKFKN

SEQ ID NO: 3 - DNA, 749 bp, Homo sapiens
agccaacagagattgttgatttgcctcttaagcaagagattcattgcagctcagcatggctcagaccagctcatacttcatgctgatctcctgcctgatgtttctgtctcagagccaaggccaagaggcccagacagagttgccccaggcccggatcagctgcccagaaggcaccaatgcctatcgctcctactgctactactttaatgaagaccgtgagacctgggttgatgcagatctctattgccagaacatgaattcgggcaacctggtgtctgtgctcacccaggccgagggtgcctttgtggcctcactgattaaggagagtggcactgatgacttcaatgtctggattggcctccatgaccccaaaaagaaccgccgctggcactggagcagtgggtccctggtctcctacaagtcctggggcattggagccccaagcagtgttaatcctggctactgtgtgagcctgacctcaagcacaggattccagaaatggaaggatgtgccttgtgaagacaagttctcctttgtctgcaagttcaaaaactagaggcagctggaaaatacatgtctagaactgatccagcaattacaacggagtcaaaaattaaaccggaccatctctccaactcaactcaacctggacactctcttctctgctgagtttgccttgttaatcttcaatagttttacctaccccagtctttggaaccttaaataataaaaataaacatgtttccact

SEQ ID NO: 4 - protein, 166 aa, Homo sapiens
MAQTSSYFMLISCLMFLSQSQGQEAQTELPQARISCPEGTNAYRSYCYYFNEDRETWVDADLYCQNMNSGNLVSVLTQAEGAFVASLIKESGTDDFNVWIGLHDPKKNRRWHWSSGSLVSYKSWGIGAPSSVNPGYCVSLTSSTGFQKWKDVPCEDKFSFVCKFKN

SEQ ID NO: 5 - DNA, 2974 bp, Homo sapiens
ctcagggcagagggaggaaggacagcagaccagacagtcacagcagccttgacaaaacgttcctggaactcaagctcttctccacagaggaggacagagcagacagcagagaccatggagtctccctcggcccctccccacagatggtgcatcccctggcagaggctcctgctcacagcctcacttctaaccttctggaacccgcccaccactgccaagctcactattgaatccacgccgttcaatgtcgcagaggggaaggaggtgcttctacttgtccacaatctgccccagcatctttttggctacagctggtacaaaggtgaaagagtggatggcaaccgtcaaattataggatatgtaataggaactcaacaagctaccccagggcccgcatacagtggtcgagagataatataccccaatgcatccctgctgatccagaacatcatccagaatgacacaggattctacaccctacacgtcataaagtcagatcttgtgaatgaagaagcaactggccagttccgggtatacccggagctgcccaagccctccatctccagcaacaactccaaacccgtggaggacaaggatgctgtggccttcacctgtgaacctgagactcaggacgcaacctacctgtggtgggtaaacaatcagagcctcccggtcagtcccaggctgcagctgtccaatggcaacaggaccctcactctattcaatgtcacaagaaatgacacagcaagctacaaatgtgaaacccagaacccagtgagtgccaggcgcagtgattcagtcatcctgaatgtcctctatggcccggatgcccccaccatttcccctctaaacacatcttacagatcaggggaaaatctgaacctctcctgccacgcagcctctaacccacctgcacagtactcttggtttgtcaatgggactttccagcaatccacccaagagctctttatccccaacatcactgtgaataatagtggatcctatacgtgccaagcccataactcagacactggcctcaataggaccacagtcacgacgatcacagtctatgcagagccacccaaacccttcatcaccagcaacaactccaaccccgtggaggatgaggatgctgtagccttaacctgtgaacctgagattcagaacacaacctacctgtggtgggtaaataatcagagcctcccggtcagtcccaggctgcagctgtccaatgacaacaggaccctcactctactcagtgtcacaaggaatgatgtaggaccctatgagtgtggaatccagaacgaattaagtgttgaccacagcgacccagtcatcctgaatgtcctctatggcccagacgaccccaccatttccccctcatacacctattaccgtccaggggtgaacctcagcctctcctgccatgcagcctctaacccacctgcacagtattcttggctgattgatgggaacatccagcaacacacacaagagctctttatctccaacatcactgagaagaacagcggactctatacctgccaggccaataactcagccagtggccacagcaggactacagtcaagacaatcacagtctctgcggagctgcccaagccctccatctccagcaacaactccaaacccgtggaggacaaggatgctgtggccttcacctgtgaacctgaggctcagaacacaacctacctgtggtgggtaaatggtcagagcctcccagtcagtcccaggctgcagctgtccaatggcaacaggaccctcactctattcaatgtcacaagaaatgacgcaagagcctatgtatgtggaatccagaactcagtgagtgcaaaccgcagtgacccagtcaccctggatgtcctctatgggccggacacccccatcatttcccccccagactcgtcttacctttcgggagcgaacctcaacctctcctgccactcggcctctaacccatccccgcagtattcttggcgtatcaatgggataccgcagcaacacacacaagttctctttatcgccaaaatcacgccaaataataacgggacctatgcctgttttgtctctaacttggctactggccgcaataattccatagtcaagagcatcacagtctctgcatctggaacttctcctggtctctcagctggggccactgtcggcatcatgattggagtgctggttggggttgctctgatatagcagccctggtgtagtttcttcatttcaggaagactgacagttgttttgcttcttccttaaagcatttgcaacagctacagtctaaaattgcttctttaccaaggatatttacagaaaagactctgaccagagatcgagaccatcctagccaacatcgtgaaaccccatctctactaaaaatacaaaaatgagctgggcttggtggcgcgcacctgtagtcccagttactcgggaggctgaggcaggagaatcgcttgaacccgggaggtggagattgcagtgagcccagatcgcaccactgcactccagtctggcaacagagcaagactccatctcaaaaagaaaagaaaagaagactctgacctgtactcttgaatacaagtttctgataccactgcactgtctgagaatttccaaaactttaatgaactaactgacagcttcatgaaactgtccaccaagatcaagcagagaaaataattaatttcatgggactaaatgaactaatgaggattgctgattctttaaatgtcttgtttcccagatttcaggaaactttttttcttttaagctatccactcttacagcaatttgataaaatatacttttgtgaacaaaaattgagacatttacattttctccctatgtggtcgctccagacttgggaaactattcatgaatatttatattgtatggtaatatagttattgcacaagttcaataaaaatctgctctttgtataacagaaaaa

SEQ ID NO: 6 - DNA, 2032 bp, Homo sapiens
tccatattgtgcttccaccactgccaataacaaaataactagcaaccatgaagtgggtggaatcaatttttttaattttcctactaaattttactgaatccagaacactgcatagaaatgaatatggaatagcttccatattggattcttaccaatgtactgcagagataagtttagctgacctggctaccatattttttgcccagtttgttcaagaagccacttacaaggaagtaagcaaaatggtgaaagatgcattgactgcaattgagaaacccactggagatgaacagtcttcagggtgtttagaaaaccagctacctgcctttctggaagaactttgccatgagaaagaaattttggagaagtacggacattcagactgctgcagccaaagtgaagagggaagacataactgttttcttgcacacaaaaagcccactccagcatcgatcccacttttccaagttccagaacctgtcacaagctgtgaagcatatgaagaagacagggagacattcatgaacaaattcatttatgagatagcaagaaggcatcccttcctgtatgcacctacaattcttctttgggctgctcgctatgacaaaataattccatcttgctgcaaagctgaaaatgcagttgaatgcttccaaacaaaggcagcaacagttacaaaagaattaagagaaagcagcttgttaaatcaacatgcatgtgcagtaatgaaaaattttgggacccgaactttccaagccataactgttactaaactgagtcagaagtttaccaaagttaattttactgaaatccagaaactagtcctggatgtggcccatgtacatgagcactgttgcagaggagatgtgctggattgtctgcaggatggggaaaaaatcatgtcctacatatgttctcaacaagacactctgtcaaacaaaataacagaatgctgcaaactgaccacgctggaacgtggtcaatgtataattcatgcagaaaatgatgaaaaacctgaaggtctatctccaaatctaaacaggtttttaggagatagagattttaaccaattttcttcaggggaaaaaaatatcttcttggcaagttttgttcatgaatattcaagaagacatcctcagcttgctgtctcagtaattctaagagttgctaaaggataccaggagttattggagaagtgtttccagactgaaaaccctcttgaatgccaagataaaggagaagaagaattacagaaatacatccaggagagccaagcattggcaaagcgaagctgcggcctcttccagaaactaggagaatattacttacaaaatgcgtttctcgttgcttacacaaagaaagccccccagctgacctcgtcggagctgatggccatcaccagaaaaatggcagccacagcagccacttgttgccaactcagtgaggacaaactattggcctgtggcgagggagcggctgacattattatcggacacttatgtatcagacatgaaatgactccagtaaaccctggtgttggccagtgctgcacttcttcatatgccaacaggaggccatgcttcagcagcttggtggtggatgaaacatatgtccctcctgcattctctgatgacaagttcattttccataaggatctgtgccaagctcagggtgtagcgctgcaaacgatgaagcaagagtttctcattaaccttgtgaagcaaaagccacaaataacagaggaacaacttgaggctgtcattgcagatttctcaggcctgttggagaaatgctgccaaggccaggaacaggaagtctgctttgctgaagagggacaaaaactgatttcaaaaactcgtgctgctttgggagtttaaattacttcaggggaagagaagacaaaacgagtctttcattcggtgtgaacttttctctttaattttaactgatttaacactttttgtgaattaatgaaatgataaagacttttatgtgagatttccttatcacagaaataaaatatctccaaatg

SEQ ID NO: 7 - DNA, 1639 bp, Homo sapiens
agcagagcacacaagcttctaggacaagagccaggaagaaaccaccggaaggaaccatctcactgtgtgtaaacatgacttccaagctggccgtggctctcttggcagccttcctgatttctgcagctctgtgtgaaggtgcagttttgccaaggagtgctaaagaacttagatgtcagtgcataaagacatactccaaacctttccaccccaaatttatcaaagaactgagagtgattgagagtggaccacactgcgccaacacagaaattattgtaaagctttctgatggaagagagctctgtctggaccccaaggaaaactgggtgcagagggttgtggagaagtttttgaagagggctgagaattcataaaaaaattcattctctgtggtatccaagaatcagtgaagatgccagtgaaacttcaagcaaatctacttcaacacttcatgtattgtgtgggtctgttgtagggttgccagatgcaatacaagattcctggttaaatttgaatttcagtaaacaatgaatagtttttcattgtaccatgaaatatccagaacatacttatatgtaaagtattatttatttgaatctacaaaaaacaacaaataatttttaaatataaggattttcctagatattgcacgggagaatatacaaatagcaaaattgagccaagggccaagagaatatccgaactttaatttcaggaattgaatgggtttgctagaatgtgatatttgaagcatcacataaaaatgatgggacaataaattttgccataaagtcaaatttagctggaaatcctggatttttttctgttaaatctggcaaccctagtctgctagccaggatccacaagtccttgttccactgtgccttggtttctcctttatttctaagtggaaaaagtattagccaccatcttacctcacagtgatgttgtgaggacatgtggaagcactttaagttttttcatcataacataaattattttcaagtgtaacttattaacctatttattatttatgtatttatttaagcatcaaatatttgtgcaagaatttggaaaaatagaagatgaatcattgattgaatagttataaagatgttatagtaaatttattttattttagatattaaatgatgttttattagataaatttcaatcagggtttttagattaaacaaagaaacaattgggtacccagttaaattttcatttcagataaacaacaaataattttttagtataagtacattattgtttatctgaaagttttaattgaactaacaatcctagtttgatactcccagtcttgtcattgccagctgtgttggtagtgctgtgttgaattacggaataatgagttagaactattaaaacagccaaaactccacagtcaatattagtaatttcttgctggttgaaacttgtttattatgtacaaatagattcttataatattatttaaatgactgcatttttaaatacaaggctttatatttttaactttaagatgtttttatgtgctctccaaattttttttactgtttctgattgtatggaaatataaaagtaaatatgaaacatttaaaatataatttgttgtcaaagtaaaaaaaaaaaaaaa

SEQ ID NO: 8 - DNA, 1524 bp, Homo sapiens
gcagagcacagcatcgtcgggaccagactcgtctcaggccagttgcagccttctcagccaaacgccgaccaaggaaaactcactaccatgagaattgcagtgatttgcttttgcctcctaggcatcacctgtgccataccagttaaacaggctgattctggaagttctgaggaaaagcagctttacaacaaatacccagatgctgtggccacatggctaaaccctgacccatctcagaagcagaatctcctagccccacagacccttccaagtaagtccaacgaaagccatgaccacatggatgatatggatgatgaagatgatgatgaccatgtggacagccaggactccattgactcgaacgactctgatgatgtagatgacactgatgattctcaccagtctgatgagtctcaccattctgatgaatctgatgaactggtcactgattttcccacggacctgccagcaaccgaagttttcactccagttgtccccacagtagacacatatgatggccgaggtgatagtgtggtttatggactgaggtcaaaatctaagaagtttcgcagacctgacatccagtaccctgatgctacagacgaggacatcacctcacacatggaaagcgaggagttgaatggtgcatacaaggccatccccgttgcccaggacctgaacgcgccttctgattgggacagccgtgggaaggacagttatgaaacgagtcagctggatgaccagagtgctgaaacccacagccacaagcagtccagattatataagcggaaagccaatgatgagagcaatgagcattccgatgtgattgatagtcaggaactttccaaagtcagccgtgaattccacagccatgaatttcacagccatgaagatatgctggttgtagaccccaaaagtaaggaagaagataaacacctgaaatttcgtatttctcatgaattagatagtgcatcttctgaggtcaattaaaaggagaaaaaatacaatttctcactttgcatttagtcaaaagaaaaaatgctttatagcaaaatgaaagagaacatgaaatgcttctttctcagtttattggttgaatgtgtatctatttgagtctggaaataactaatgtgtttgataattagtttagtttgtggcttcatggaaactccctgtaaactaaaagcttcagggttatgtctatgttcattctatagaagaaatgcaaactatcactgtattttaatatttgttattctctcatgaatagaaatttatgtagaagcaaacaaaatacttttacccacttaaaaagagaatataacattttatgtcactataatcttttgttttttaagttagtgtatattttgttgtgattatctttttgtggtgtgaataaatcttttatcttgaatgtaataagaatttggtggtgtcaattgcttatttgttttcccacggttgtccagcaattaataaaacataaccttttttactgcctaaaaaaaaaaaaaaaaaaaa

SEQ ID NO: 9 - DNA, 5500 bp, Homo sapiens
gcagaccgtcgctaatgaatcttggggccggtgtcgggccggggcggcttgatcggcaactaggaaaccccaggcgcagaggccaggagcgagggcagcgaggatcagaggccaggccttcccggctgccggcgctcctcggaggtcagggcagatgaggaacatgactctcccccttcggaggaggaaggaagtcccgctgccaccttatctctgctcctctgcctcctccctgttcccagagctttttctctagagaagattttgaaggcggcttttgtgctgacggccacccaccatcatctaaagaagataaacttggcaaatgacatgcaggttcttcaaggcagaataattgcagaaaatcttcaaaggaccctatctgcagatgttctgaatacctctgagaatagagattgattattcaaccaggatacctaattcaagaactccagaaatcaggagacggagacattttgtcagttttgcaacattggaccaaatacaatgaagtattcttgctgtgctctggttttggctgtcctgggcacagaattgctgggaagcctctgttcgactgtcagatccccgaggttcagaggacggatacagcaggaacgaaaaaacatccgacccaacattattcttgtgcttaccgatgatcaagatgtggagctggggtccctgcaagtcatgaacaaaacgagaaagattatggaacatgggggggccaccttcatcaatgcctttgtgactacacccatgtgctgcccgtcacggtcctccatgctcaccgggaagtatgtgcacaatcacaatgtctacaccaacaacgagaactgctcttccccctcgtggcaggccatgcatgagcctcggacttttgctgtatatcttaacaacactggctacagaacagccttttttggaaaatacctcaatgaatataatggcagctacatcccccctgggtggcgagaatggcttggattaatcaagaattctcgcttctataattacactgtttgtcgcaatggcatcaaagaaaagcatggatttgattatgcaaaggactacttcacagacttaatcactaacgagagcattaattacttcaaaatgtctaagagaatgtatccccataggcccgttatgatggtgatcagccacgctgcgccccacggccccgaggactcagccccacagttttctaaactgtaccccaatgcttcccaacacataactcctagttataactatgcaccaaatatggataaacactggattatgcagtacacaggaccaatgctgcccatccacatggaatttacaaacattctacagcgcaaaaggctccagactttgatgtcagtggatgattctgtggagaggctgtataacatgctcgtggagacgggggagctggagaatacttacatcatttacaccgccgaccatggttaccatattgggcagtttggactggtcaaggggaaatccatgccatatgactttgatattcgtgtgcctttttttattcgtggtccaagtgtagaaccaggatcaatagtcccacagatcgttctcaacattgacttggcccccacgatcctggatattgctgggctcgacacacctcctgatgtggacggcaagtctgtcctcaaacttctggacccagaaaagccaggtaacaggtttcgaacaaacaagaaggccaaaatttggcgtgatacattcctagtggaaagaggcaaatttctacgtaagaaggaagaatccagcaagaatatccaacagtcaaatcacttgcccaaatatgaacgggtcaaagaactatgccagcaggccaggtaccagacagcctgtgaacaaccggggcagaagtggcaatgcattgaggatacatctggcaagcttcgaattcacaagtgtaaaggacccagtgacctgctcacagtccggcagagcacgcggaacctctacgctcgcggcttccatgacaaagacaaagagtgcagttgtagggagtctggttaccgtgccagcagaagccaaagaaagagtcaacggcaattcttgagaaaccaggggactccaaagtacaagcccagatttgtccatactcggcagacacgttccttgtccgtcgaatttgaaggtgaaatatatgacataaatctggaagaagaagaagaattgcaagtgttgcaaccaagaaacattgctaagcgtcatgatgaaggccacaaggggccaagagatctccaggcttccagtggtggcaacaggggcaggatgctggcagatagcagcaacgccgtgggcccacctaccactgtccgagtgacacacaagtgttttattcttcccaatgactctatccattgtgagagagaactgtaccaatcggccagagcgtggaaggaccataaggcatacattgacaaagagattgaagctctgcaagataaaattaagaatttaagagaagtgagaggacatctgaagagaaggaagcctgaggaatgtagctgcagtaaacaaagctattacaataaagagaaaggtgtaaaaaagcaagagaaattaaagagccatcttcacccattcaaggaggctgctcaggaagtagatagcaaactgcaacttttcaaggagaacaaccgtaggaggaagaaggagaggaaggagaagagacggcagaggaagggggaagagtgcagcctgcctggcctcacttgcttcacgcatgacaacaaccactggcagacagccccgttctggaacctgggatctttctgtgcttgcacgagttctaacaataacacctactggtgtttgcgtacagttaatgagacgcataattttcttttctgtgagtttgctactggctttttggagtattttgatatgaatacagatccttatcagctcacaaatacagtgcacacggtagaacgaggcattttgaatcagctacacgtacaactaatggagctcagaagctgtcaaggatataagcagtgcaacccaagacctaagaatcttgatgttggaaataaagatggaggaagctatgacctacacagaggacagttatgggatggatgggaaggttaatcagccccgtctcactgcagacatcaactggcaaggcctagaggagctacacagtgtgaatgaaaacatctatgagtacagacaaaactacagacttagtctggtggactggactaattacttgaaggatttagatagagtatttgcactgctgaagagtcactatgagcaaaataaaacaaataagactcaaactgctcaaagtgacgggttcttggttgtctctgctgagcacgctgtgtcaatggagatggcctctgctgactcagatgaagacccaaggcataaggttgggaaaacacctcatttgaccttgccagctgaccttcaaaccctgcatttgaaccgaccaacattaagtccagagagtaaacttgaatggaataacgacattccagaagttaatcatttgaattctgaacactggagaaaaaccgaaaaatggacggggcatgaagagactaatcatctggaaaccgatttcagtggcgatggcatgacagagctagagctcgggcccagccccaggctgcagcccattcgcaggcacccgaaagaacttccccagtatggtggtcctggaaaggacatttttgaagatcaactatatcttcctgtgcattccgatggaatttcagttcatcagatgttcaccatggccaccgcagaacaccgaagtaattccagcatagcggggaagatgttgaccaaggtggagaagaatcacgaaaaggagaagtcacagcacctagaaggcagcgcctcctcttcactctcctctgattagatgaaactgttaccttaccctaaacacagtatttctttttaacttttttatttgtaaactaataaaggtaatcacagccaccaacattccaagctaccctgggtacctttgtgcagtagaagctagtgagcatgtgagcaagcggtgtgcacacggagactcatcgttataatttactatctgccaagagtagaaagaaaggctggggatatttgggttggcttggttttgattttttgcttgtttgtttgttttgtactaaaacagtattatcttttgaatatcgtagggacataagtatatacatgttatccaatcaagatggctagaatggtgcctttctgagtgtctaaaacttgacacccctggtaaatctttcaacacacttccactgcctgcgtaatgaagttttgattcatttttaaccactggaatttttcaatgccgtcattttcagttagatgattttgcactttgagattaaaatgccatgtctatttgattagtcttatttttttatttttacaggcttatcagtctcactgttggctgtcattgtgacaaagtcaaataaacccccaaggacgacacacagtatggatcacatattgtttgacattaagcttttgccagaaaatgttgcatgtgttttacctcgacttgctaaaatcgattagcagaaaggcatggctaataatgttggtggtgaaaataaataaataagtaaacaaaatgaagattgcctgctctctctgtgcctagcctcaaagcgttcatcatacatcatacctttaagattgctatattttgggttattttcttgacaggagaaaaagatctaaagatcttttattttcatcttttttggttttcttggcatgactaagaagcttaaatgttgataaaatatgactagttttgaatttacaccaagaacttctcaataaaagaaaatcatgaatgctccacaatttcaacataccacaagagaagttaatttcttaacattgtgttctatgattatttgtaagaccttcaccaagttctgatatcttttaaagacatagttcaaaattgcttttgaaaatctgtattcttgaaaatatccttgttgtgtattaggtttttaaataccagctaaaggattacctcactgagtcatcagtaccctcctattcagctccccaagatgatgtgtttttgcttaccctaagagaggttttcttcttatttttagataattcaagtgcttagataaattatgttttctttaagtgtttatggtaaactcttttaaagaaaatttaatatgttatagctgaatctttttggtaactttaaatctttatcatagactctgtacatatgttcaaattagctgcttgcctgatgtgtgtatcatcggtgggatgacagaacaaacatatttatgatcatgaataatgtgctttgtaaaaagatttcaagttattaggaagcatactctgttttttaatcatgtataatattccatgatacttttatagaacaattctggcttcaggaaagtctagaagcaatatttcttcaaataaaaggtgtttaaacttt

SEQ ID NO: 10 - DNA, 1778 bp, Homo sapiens
tagaagtttacaatgaagtttcttctaatactgctcctgcaggccactgcttctggagctcttcccctgaacagctctacaagcctggaaaaaaataatgtgctatttggtgagagatacttagaaaaattttatggccttgagataaacaaacttccagtgacaaaaatgaaatatagtggaaacttaatgaaggaaaaaatccaagaaatgcagcacttcttgggtctgaaagtgaccgggcaactggacacatctaccctggagatgatgcacgcacctcgatgtggagtccccgatctccatcatttcagggaaatgccaggggggcccgtatggaggaaacattatatcacctacagaatcaataattacacacctgacatgaaccgtgaggatgttgactacgcaatccggaaagctttccaagtatggagtaatgttacccccttgaaattcagcaagattaacacaggcatggctgacattttggtggtttttgcccgtggagctcatggagacttccatgcttttgatggcaaaggtggaatcctagcccatgcttttggacctggatctggcattggaggggatgcacatttcgatgaggacgaattctggactacacattcaggaggcacaaacttgttcctcactgctgttcacgagattggccattccttaggtcttggccattctagtgatccaaaggctgtaatgttccccacctacaaatatgtcgacatcaacacatttcgcctctctgctgatgacatacgtggcattcagtccctgtatggagacccaaaagagaaccaacgcttgccaaatcctgacaattcagaaccagctctctgtgaccccaatttgagttttgatgctgtcactaccgtgggaaataagatctttttcttcaaagacaggttcttctggctgaaggtttctgagagaccaaagaccagtgttaatttaatttcttccttatggccaaccttgccatctggcattgaagctgcttatgaaattgaagccagaaatcaagtttttctttttaaagatgacaaatactggttaattagcaatttaagaccagagccaaattatcccaagagcatacattcttttggttttcctaactttgtgaaaaaaattgatgcagctgtttttaacccacgtttttataggacctacttctttgtagataaccagtattggaggtatgatgaaaggagacagatgatggaccctggttatcccaaactgattaccaagaacttccaaggaatcgggcctaaaattgatgcagtcttctattctaaaaacaaatactactatttcttccaaggatctaaccaatttgaatatgacttcctactccaacgtatcaccaaaacactgaaaagcaatagctggtttggttgttagaaatggtgtaattaatggtttttgttagttcacttcagcttaataagtatttattgcatatttgctatgtcctcagtgtaccactacttagagatatgtatcataaaaataaaatctgtaaaccataggtaatgattatataaaatacataatatttttcaattttgaaaactctaattgtccattcttgcttgactctactattaagtttgaaaatagttaccttcaaagcaagataattctatttgaagcatgctctgtaagttgcttcctaacatccttggactgagaaattatacttacttctggcataactaaaattaagtatatatattttggctcaaataaaattg

SEQ ID NO: 11 - DNA, 777 bp, Homo sapiens
ggccccttgtctgcagagatggctcccaatgcttcctgcctctgtgtgcatgtccgttccgaggaatgggatttaatgacctttgatgccaacccatatgacagcgtgaaaaaaatcaaagaacatgtccggtctaagaccaaggttcctgtgcaggaccaggttcttttgctgggctccaagatcttaaagccacggagaagcctctcatcttatggcattgacaaagagaagaccatccaccttaccctgaaagtggtgaagcccagtgatgaggagctgcccttgtttcttgtggagtcaggtgatgaggcaaagaggcacctcctccaggtgcgaaggtccagctcagtggcacaagtgaaagcaatgatcgagactaagacgggtataatccctgagacccagattgtgacttgcaatggaaagagactggaagatgggaagatgatggcagattacggcatcagaaagggcaacttactcttcctggcatcttattgtattggagggtgaccaccctggggatggggtgttggcaggggtcaaaaagcttatttcttttaatctcttactcaacgaacacatcttctgatgatttcccaaaattaatgagaatgagatgagtagagtaagatttgggtgggatgggtaggatgaagtatattgcccaactctatgtttctttgattctaacacaattaattaagtgacatgatttttactaatgtattactgagactagtaaataaatttttaaggcaaaatagagcattc

SEQ ID NO: 12 - DNA, 5921 bp, Homo sapiens
agcagacgggagtttctcctcggggtcggagcaggaggcacgcggagtgtgaggccacgcatgagcggacgctaaccccctccccagccacaaagagtctacatgtctagggtctagacatgttcagctttgtggacctccggctcctgctcctcttagcggccaccgccctcctgacgcacggccaagaggaaggccaagtcgagggccaagacgaagacatcccaccaatcacctgcgtacagaacggcctcaggtaccatgaccgagacgtgtggaaacccgagccctgccggatctgcgtctgcgacaacggcaaggtgttgtgcgatgacgtgatctgtgacgagaccaagaactgccccggcgccgaagtccccgagggcgagtgctgtcccgtctgccccgacggctcagagtcacccaccgaccaagaaaccaccggcgtcgagggacccaagggagacactggcccccgaggcccaaggggacccgcaggcccccctggccgagatggcatccctggacagcctggacttcccggaccccccggaccccccggacctcccggaccccctggcctcggaggaaactttgctccccagctgtcttatggctatgatgagaaatcaaccggaggaatttccgtgcctggccccatgggtccctctggtcctcgtggtctccctggcccccctggtgcacctggtccccaaggcttccaaggtccccctggtgagcctggcgagcctggagcttcaggtcccatgggtccccgaggtcccccaggtccccctggaaagaatggagatgatggggaagctggaaaacctggtcgtcctggtgagcgtgggcctcctgggcctcagggtgctcgaggattgcccggaacagctggcctccctggaatgaagggacacagaggtttcagtggtttggatggtgccaagggagatgctggtcctgctggtcctaagggtgagcctggcagccctggtgaaaatggagctcctggtcagatgggcccccgtggcctgcctggtgagagaggtcgccctggagcccctggccctgctggtgctcgtggaaatgatggtgctactggtgctgccgggccccctggtcccaccggccccgctggtcctcctggcttccctggtgctgttggtgctaagggtgaagctggtccccaagggccccgaggctctgaaggtccccagggtgtgcgtggtgagcctggcccccctggccctgctggtgctgctggccctgctggaaaccctggtgctgatggacagcctggtgctaaaggtgccaatggtgctcctggtattgctggtgctcctggcttccctggtgcccgaggcccctctggaccccagggccccggcggccctcctggtcccaagggtaacagcggtgaacctggtgctcctggcagcaaaggagacactggtgctaagggagagcctggccctgttggtgttcaaggaccccctggccctgctggagaggaaggaaagcgaggagctcgaggtgaacccggacccactggcctgcccggaccccctggcgagcgtggtggacctggtagccgtggtttccctggcgcagatggtgttgctggtcccaagggtcccgctggtgaacgtggttctcctggccccgctggccccaaaggatctcctggtgaagctggtcgtcccggtgaagctggtctgcctggtgccaagggtctgactggaagccctggcagccctggtcctgatggcaaaactggcccccctggtcccgccggtcaagatggtcgccccggacccccaggcccacctggtgcccgtggtcaggctggtgtgatgggattccctggacctaaaggtgctgctggagagcccggcaaggctggagagcgaggtgttcccggaccccctggcgctgtcggtcctgctggcaaagatggagaggctggagctcagggaccccctggccctgctggtcccgctggcgagagaggtgaacaaggccctgctggctcccccggattccagggtctccctggtcctgctggtcctccaggtgaagcaggcaaacctggtgaacagggtgttcctggagaccttggcgcccctggcccctctggagcaagaggcgagagaggtttccctggcgagcgtggtgtgcaaggtccccctggtcctgctggaccccgaggggccaacggtgctcccggcaacgatggtgctaagggtgatgctggtgcccctggagctcccggtagccagggcgcccctggccttcagggaatgcctggtgaacgtggtgcagctggtcttccagggcctaagggtgacagaggtgatgctggtcccaaaggtgctgatggctctcctggcaaagatggcgtccgtggtctgaccggccccattggtcctcctggccctgctggtgcccctggtgacaagggtgaaagtggtcccagcggccctgctggtcccactggagctcgtggtgcccccggagaccgtggtgagcctggtccccccggccctgctggctttgctggcccccctggtgctgacggccaacctggtgctaaaggcgaacctggtgatgctggtgccaaaggcgatgctggtccccctgggcctgccggacccgctggaccccctggccccattggtaatgttggtgctcctggagccaaaggtgctcgcggcagcgctggtccccctggtgctactggtttccctggtgctgctggccgagtcggtcctcctggcccctctggaaatgctggaccccctggccctcctggtcctgctggcaaagaaggcggcaaaggtccccgtggtgagactggccctgctggacgtcctggtgaagttggtccccctggtccccctggccctgctggcgagaaaggatcccctggtgctgatggtcctgctggtgctcctggtactcccgggcctcaaggtattgctggacagcgtggtgtggtcggcctgcctggtcagagaggagagagaggcttccctggtcttcctggcccctctggtgaacctggcaaacaaggtccctctggagcaagtggtgaacgtggtccccccggtcccatgggcccccctggattggctggaccccctggtgaatctggacgtgagggggctcctgctgccgaaggttcccctggacgagacggttctcctggcgccaagggtgaccgtggtgagaccggccccgctggaccccctggtgctcctggtgctcctggtgcccctggccccgttggccctgctggcaagagtggtgatcgtggtgagactggtcctgctggtcccgccggtcccgtcggccccgtcggcgcccgtggccccgccggaccccaaggcccccgtggtgacaagggtgagacaggcgaacagggcgacagaggcataaagggtcaccgtggcttctctggcctccagggtccccctggccctcctggctctcctggtgaacaaggtccctctggagcctctggtcctgctggtccccgaggtccccctggctctgctggtgctcctggcaaagatggactcaacggtctccctggccccattgggccccctggtcctcgcggtcgcactggtgatgctggtcctgttggtccccccggccctcctggacctcctggtccccctggtcctcccagcgctggtttcgacttcagcttcctgccccagccacctcaagagaaggctcacgatggtggccgctactaccgggctgatgatgccaatgtggttcgtgaccgtgacctcgaggtggacaccaccctcaagagcctgagccagcagatcgagaacatccggagcccagagggaagccgcaagaaccccgcccgcacctgccgtgacctcaagatgtgccactctgactggaagagtggagagtactggattgaccccaaccaaggctgcaacctggatgccatcaaagtcttctgcaacatggagactggtgagacctgcgtgtaccccactcagcccagtgtggcccagaagaactggtacatcagcaagaaccccaaggacaagaggcatgtctggttcggcgagagcatgaccgatggattccagttcgagtatggcggccagggctccgaccctgccgatgtggccatccagctgaccttcctgcgcctgatgtccaccgaggcctcccagaacatcacctaccactgcaagaacagcgtggcctacatggaccagcagactggcaacctcaagaaggccctgctcctcaagggctccaacgagatcgagatccgcgccgagggcaacagccgcttcacctacagcgtcactgtcgatggctgcacgagtcacaccggagcctggggcaagacagtgattgaatacaaaaccaccaagtcctcccgcctgcccatcatcgatgtggcccccttggacgttggtgccccagaccaggaattcggcttcgacgttggccctgtctgcttcctgtaaactccctccatcccaacctggctccctcccacccaaccaactttccccccaacccggaaacagacaagcaacccaaactgaacccccccaaaagccaaaaaatgggagacaatttcacatggactttggaaaatatttttttcctttgcattcatctctcaaacttagtttttatctttgaccaaccgaacatgaccaaaaaccaaaagtgcattcaaccttaccaaaaaaaaaaaaaaaaaaaaaagaataaataaataagtttttaaaaaaggaagcttggtccacttgcttgaagacccatgcgggggtaagtccctttctgcccgttgggttatgaaaccccaatgctgccctttctgctcctttctccacaccccccttggcctcccctccactccttcccaaatctgtctccccagaagacacaggaaacaatgtattgtctgcccagcaatcaaaggcaatgctcaaacacccaagtggcccccaccctcagcccgctcctgcccgcccagcacccccaggccctggggacctggggttctcagactgccaaagaagccttgccatctggcgctcccatggctcttgcaacatctccccttcgtttttgagggggtcatgccgggggagccaccagcccctcactgggttcggaggagagtcaggaagggccacgacaaagcagaaacatcggatttggggaacgcgtgtcatcccttgtgccgcaggctgggcgggagagactgttctgttctgttccttgtgtaactgtgttgctgaaagactacctcgttcttgtcttgatgtgtcaccggggcaactgcctgggggcggggatgggggcagggtggaagcggctccccatttttataccaaaggtgctacatctatgtgatgggtggggtggggagggaatcactggtgctatagaaattgagatgcccccccaggccagcaaatgttcctttttgttcaaagtctatttttattccttgatattttttctttctttttttttttttttgtggatggggacttgtgaatttttctaaaggtgctatttaacatgggaggagagcgtgtgcgctccagcccagcccgctgctcactttccaccctctctccacctgcctctggcttctcaggcctctgctctccgacctctctcctctgaaaccctcctccacagctgcagcccatcctcccggctccctcctagtctgtcctgcgtcctctgtccccgggtttcagagacaacttcccaaagcacaaagcagtttttccctaggggtgggaggaagcaaaagactctgtacctattttgtatgtgtataataatttgagatgtttttaattattttgattgctggaataaagcatgtggaaatgacccaaacataa

SEQ ID NO: 13 - DNA, 1804 bp, Homo sapiens
gtatcactcagaatctggcagccagttccgtcctgacagagttcacagcatatattggtggattcttgtccatagtgcatctgctttaagaattaacgaaagcagtgtcaagacagtaaggattcaaaccatttgccaaaaatgagtctaagtgcatttactctcttcctggcattgattggtggtaccagtggccagtactatgattatgattttcccctatcaatttatgggcaatcatcaccaaactgtgcaccagaatgtaactgccctgaaagctacccaagtgccatgtactgtgatgagctgaaattgaaaagtgtaccaatggtgcctcctggaatcaagtatctttaccttaggaataaccagattgaccatattgatgaaaaggcctttgagaatgtaactgatctgcagtggctcattctagatcacaaccttctagaaaactccaagataaaagggagagttttctctaaattgaaacaactgaagaagctgcatataaaccacaacaacctgacagagtctgtgggcccacttcccaaatctctggaggatctgcagcttactcataacaagatcacaaagctgggctcttttgaaggattggtaaacctgaccttcatccatctccagcacaatcggctgaaagaggatgctgtttcagctgcttttaaaggtcttaaatcactcgaataccttgacttgagcttcaatcagatagccagactgccttctggtctccctgtctctcttctaactctctacttagacaacaataagatcagcaacatccctgatgagtatttcaagcgttttaatgcattgcagtatctgcgtttatctcacaacgaactggctgatagtggaatacctggaaattctttcaatgtgtcatccctggttgagctggatctgtcctataacaagcttaaaaacataccaactgtcaatgaaaaccttgaaaactattacctggaggtcaatcaacttgagaagtttgacataaagagcttctgcaagatcctggggccattatcctactccaagatcaagcatttgcgtttggatggcaatcgcatctcagaaaccagtcttccaccggatatgtatgaatgtctacgtgttgctaacgaagtcactcttaattaatatctgtatcctggaacaatattttatggttatgtttttctgtgtgtcagttttcatagtatccatattttattactgtttattacttccatgaattttaaaatctgagggaaatgttttgtaaacatttattttttttaaagaaaagatgaaaggcaggcctatttcatcacaagaacacacacatatacacgaatagacatcaaactcaatgctttatttgtaaatttagtgtttttttatttctactgtcaaatgatgtgcaaaaccttttactggttgcatggaaatcagccaagttttataatccttaaatcttaatgttcctcaaagcttggattaaatacatatggatgttactctcttgcaccaaattatcttgatacattcaaatttgtctggttaaaaaataggtggtagatattgaggccaagaatattgcaaaatacatgaagcttcatgcacttaaagaagtatttttagaataagaatttgcatacttacctagtgaaacttttctagaattatttttcactctaagtcatgtatgtttctctttgattatttgcatgttatgtttaataagctactagcaaaataaaacatagcaaatgaaaaaaaaaaaaaaaaaaaaaaaaaaaaaaaa

SEQ ID NO: 14 - DNA, 4827 bp, Homo sapiens
gcggtggcgctgcggagacccggtccagacgcctggcggccgccggcacacaaggcgctttctagctccctcccccgagcgcacagcccgcctccttccgcggcgcctgcagtggcaggcttgctctgccctaccgtgacgcgctccggagacgctctgcgggtcctggacaccgggtccgcggcgtggggacgacagacggaggcgaacgccatcggtagccggtccgcgagccatcgttcggggcgcagtcctctccccggctggccctcctttctccggggcattcgccaccgcttccctgggctgagacgaccggttcgtcgcctccttgcccgtgaccgtcgctagaactcagttgtgcgttgcggccagtcgccactgctgagtggaagcaaaatgtcagtcagtgtgcatgagaaccgcaagtccagggccagcagcggctccattaacatctatctgtttcacaagtcctcctacgctgacagcgtcctcactcacctgaatcttttacgccagcagcgtctcttcactgacgtccttctccatgccggaaataggaccttcccttgccaccgggcagtgctggctgcatgcagtcgctactttgaggccatgttcagtggtggcctgaaagagagccaggacagtgaggtcaactttgacaattccatccacccagaagtcttggagctgctgcttgactatgcgtactcctcccgggtcatcatcaatgaagaaaatgcagaatcgctcctggaagctggtgacatgctggagtttcaagacatccgggatgcatgtgcagagttcctggaaaagaacctgcatcccaccaactgcctgggcatgctgctgctgtctgatgcacaccagtgcaccaagctgtacgaactatcttggagaatgtgtctcagcaacttccaaaccatcaggaagaatgaagatttcctccagctgccccaggacatggtagtgcaactcttgtccagtgaagagctggagacagaggatgaaaggcttgtgtacgagtctgcaattaactggatcagctatgacctgaagaagcgctattgctacctcccagaactgttgcagacagtaaggctggcacttctgccagccatctatctcatggagaatgtggccatggaggaactcatcaccaagcagagaaagagtaaggaaattgtggaagaggccatcaggtgcaaactgaaaatcctgcagaatgacggtgtggtaaccagcctctgtgcccgacctcggaaaactggccatgccctcttccttctgggaggacagactttcatgtgtgacaagttgtatctggtagaccagaaggccaaagaaatcattcccaaggctgacattcccagcccaagaaaagagtttagtgcatgtgcgattggctgcaaagtgtacattactggggggcgggggtctgaaaatggggtctcgaaagatgtctgggtttatgataccctgcacgaggagtggtccaaggctgcccccatgctggtggccaggtttggccatggctctgctgaactgaagcactgcctgtatgtggttggggggcacacggccgcaactggctgcctcccggcctccccctcagtctctctaaagcaggtagaacattatgaccccacaatcaacaaatggaccatggtggccccactccgagaaggcgttagcaacgccgcagtagtgagtgccaaacttaagttatttgctttcggaggtaccagtgtcagtcatgacaagctccccaaagttcagtgttacgatcagtgtgaaaacaggtggactgtaccggccacctgtccccagccctggcgttacacagcagcagctgtgctggggaaccagatttttattatggggggtgatacagaattctctgcctgctctgcttataaattcaacagtgagacttaccagtggaccaaagtgggagatgtgacagcaaagcgcatgagctgccatgctgtggcctctggaaacaaactctacgtggttggaggatactttggcattcagcgatgcaagactttggactgctacgatccaacattagacgtgtggaacagcatcaccactgtcccgtactcgctgattcctactgcatttgtcagcacctggaaacatctgccttcttaaatgcagtacattctaaagagagtgagcatgagctcactccatcactcgatgagataatatgagatttctacttcggagaggccaagtctaatgaagagaaaaaaaggaaaagaagttgcaagactcgaataaaatctgctgcaccttgtaaatgctctaactggacatgaaggaaaggggcgagggaggggggtgggatttttggtgcaagtagcacatggtttaaatatgaatgaacaaacctgtgatctagtccttgtcttgtaattgtggattaatgtcaatgttaatcagcccctcaaagggagagaaaagctggaccttttcccttgctgtaccatattcagcatttgatttccatgggccccaccatttatgtgtagaatttgaaatggttgtcacctctctctgaggacagagcttgaagcctccacaccagctgctgctggagattcaaagcccaactgtgggtccgagagggaagctggctgggctggctgaagaatgaagaccactggactctccgttaatctctaaggggtctgctccccaggaacgtttctgaacaatggggactttgttggtagccatttggtagatgttcttttctatttataagtgactttaaactttcccttggctgttaagaagtttgttatagatttagctatttattgttcgatgcctgcatgctgaaacaatgcctacagctgtcttcacatgtatggacgtgtgtgaatggttgtacgttttgcacattttgtggctgttgagatgtgctttgctgcacaaacatgaaaatttttgagttacaatttggagcataactggagggtgggctggggaggggtggatttttaaaatgtcaagacagggaaggatgacaaaatggaaatttaaatgacatcctagaggtagagaaaccgtggagatcgcttttctcagactcaccaacttttaatgggatttcatggggtttggttgtgctgatagggtaaggggaggctgctttctgcccttctccccactcccatctgatttacttaattcagtctcagctgctgaaatttggaaaggaccaaattgctttacagtttttttctttgtgtagtatcttgaaatcctggaaaattctatggaatagttctgtatatagggcacaagtaaaggcattgtccaaagtttatttatttatttattaccctaagaatgctttgccataaccacatttaatgggaaaaacggcatgtatcacagatgtaaattaactcaccagatttactgggcctgaactcattctcttcttgctatatgatttagcaagttctagaaggtctccaagacaataattacattggcacaatgtatacttcagtgctcacccgtagcaaatctctttttaaaaaactctttggtgcacaagtaacacatttggccacaaaacaccaaagaattgtaggcagtggcccctattgagaagttttccggtagagttggaaatcagttgtgaatacattctttgctagttggagtgcttgtttactaagcatgtgccgtcgtaggtattagtgctagtctcaaataggtgcttcccctgaggtgcaggggaagaccaaagtttgcaactcgaactgctttcgtccatgtttctcacattgctgtattttagaaaataggggttaagactgataacaaccttttacattgtgactgtgtttgcattgtctaatgacagataaatccttaacatttctctccaccttagtactttagactaattgtgtttgtccgtccatgccatgaatgagtgggctgtagttgggcctaaataaatgagctgttggaagaaaagaatcacagtactttccagcagtcagtccctggttcctagatgtgttctaagcaatgcaaatgtctaattgtcccccagtgggcatagtcagtgtcgtttatattgtagcagttacagctctgtagtttatgatgcaaatctgccaagagagatgtatgtgtcactgcatggcttctgaaagcaggatgaattttctgcagctgtttcaaagttggggtctgttcttgaatcctctattaattactgtgtgtgagccagagggagctgtggtaagggttgggcccccagcctgtagggaactttctggactcccactctttgaatcgatataggcatttggtctcactacttgaccattctcaccctgtgaaacgtcccacactttgaagcaaatacaattcacagcacagtacacacaaaaaccttggcataagacagagaaggttcttcttattttgtgggctggttgctgtagaaacatataacaaagggcagccctccacttctggtataattgtgtagccccttttctttgggcttgacacctgtcttgaataagagtgattagagctgcataatgtccctctcttggctattgaccatgtggttcacgtacaaaactctgtataagttgaaggaaaatgttcatgttcatatgtacttgtttgctatgactacattttgaggttttgtaaaactgttatttttttttttttcacaatgtgaaactgaaggtcaataaattattagagattttctcttcaaaaaaaaaaaaaaaaaaaaaaaaaaaaaaaaaaaaaaaaaaa

SEQ ID NO: 15 - DNA, 1098 bp, Homo sapiens
cggcacgagggtcccgcgcgctcctccgacccgctccgctccgctccgctcggccccgcgccgcccgtcaacatgatccgctgcggcctggcctgcgagcgctgccgctggatcctgcccctgctcctactcagcgccatcgccttcgacatcatcgcgctggccggccgcggctggttgcagtctagcgaccacggccagacgtcctcgctgtggtggaaatgctcccaagagggcggcggcagcgggtcctacgaggagggctgtcagagcctcatggagtacgcgtggggtagagcagcggctgccatgctcttctgtggcttcatcatcctggtgatctgtttcatcctctccttcttcgccctctgtggaccccagatgcttgtcttcctgagagtgattggaggtctccttgccttggctgctgtgttccagatcatctccctggtaatttaccccgtgaagtacacccagaccttcacccttcatgccaaccctgctgtcacttacatctataactgggcctacggctttgggtgggcagccacgattatcctgattggctgtgccttcttcttctgctgcctcctcaactacgaagatgaccttctgggcaatgccaagcccaggtacttctacacatctgcctaacttgggaatgaatgtgggagaaaatcgctgctgctgagatggactccagaagaagaaactgtttctccaggcgactttgaacccattttttggcagtgttcatattattaaactagtcaaaaatgctaaaataatttgggagaaaatattttttaagtagtgttatagtttcatgtttatcttttattatgttttgtgaagttgtgtcttttcactaattacctatactatgccaatatttccttatatctatccataacatttatactacatttgtaagagaatatgcacgtgaaacttaacactttataaggtaaaaatgaggtttccaagatttaataatctgatcaagttcttgttatttccaaatagaatggactcggtctgttaagggctaaggagaagaggaagataaggttaaaagttgttaatgaccaaacattc

SEQ ID NO: 16 - DNA, 1381 bp, Homo sapiens
atgcgcgatctcccggagcatgcgcagcagcggcgccgacgcggggcggtgcctggtgaccgcgcgcgctcccggaagtgtgccggcgtcgcgcgaaggttcagcagggagccgtgggccgggcgcgcggttcccggcacgtgtctcggcacgtggcagcgcgcctggccctgggcttggaggcgccggcgccctggatccgccggccgtggtcgccgagtcggtgtcgtccttgaccatcgccgacgcgttcattgcagccggcgagagctcagctccgaccccgccgcgccccgcgcttcccaggaggttcatctgctccttccctgactgcagcgccaattacagcaaagcctggaagcttgacgcgcacctgtgcaagcacacgggggagagaccatttgtttgtgactatgaagggtgtggcaaggccttcatcagggactaccatctgagccgccacattctgactcacacaggagaaaagccgtttgtttgtgcagccaatggctgtgatcaaaaattcaacacaaaatcaaacttgaagaaacattttgaacgcaaacatgaaaatcaacaaaaacaatatatatgcagttttgaagactgtaagaagacctttaagaaacatcagcagctgaaaatccatcagtgccagaataccaatgaacctctattcaagtgtacccaggaaggatgtgggaaacactttgcatcacccagcaagctgaaacgacatgccaaggcccacgagggctatgtatgtcaaaaaggatgttcctttgtggcaaaaacatggacggaacttctgaaacatgtgagagaaacccataaagaggaaatactatgtgaagtatgccggaaaacatttaaacgcaaagattaccttaagcaacacatgaaaactcatgccccagaaagggatgtatgtcgctgtccaagagaaggctgtggaagaacctatacaactgtgtttaatctccaaagccatatcctctccttccatgaggaaagccgcccttttgtgtgtgaacatgctggctgtggcaaaacatttgcaatgaaacaaagtctcactaggcatgctgttgtacatgatcctgacaagaagaaaatgaagctcaaagtcaaaaaatctcgtgaaaaacgggagtttggcctctcatctcagtggatatatcctcccaaaaggaaacaagggcaaggcttatctttgtgtcaaaacggagagtcacccaactgtgtggaagacaagatgctctcgacagttgcagtacttacccttggctaagaactgcactgctttgtttaaaggactgcagaccaaggagtcgagctttctctcagagcatgcttttctttattaaaattactgatgcag

SEQ ID NO: 17 - DNA, 1978 bp, Homo sapiens
gggagggtacttagggccggggctggcccaggctacggcggctgcagggctccggcaaccgctccggcaacgccaaccgctccgctgcgcgcaggctgggctgcaggctctcggctgcagcgctgggtggatctaggatccggcttccaacatgtggcagctctgggcctccctctgctgcctgctggtgttggccaatgcccggagcaggccctctttccatcccctgtcggatgagctggtcaactatgtcaacaaacggaataccacgtggcaggccgggcacaacttctacaacgtggacatgagctacttgaagaggctatgtggtaccttcctgggtgggcccaagccaccccagagagttatgtttaccgaggacctgaagctgcctgcaagcttcgatgcacgggaacaatggccacagtgtcccaccatcaaagagatcagagaccagggctcctgtggctcctgctgggccttcggggctgtggaagccatctctgaccggatctgcatccacaccaatgcgcacgtcagcgtggaggtgtcggcggaggacctgctcacatgctgtggcagcatgtgtggggacggctgtaatggtggctatcctgctgaagcttggaacttctggacaagaaaaggcctggtttctggtggcctctatgaatcccatgtagggtgcagaccgtactccatccctccctgtgagcaccacgtcaacggctcccggcccccatgcacgggggagggagatacccccaagtgtagcaagatctgtgagcctggctacagcccgacctacaaacaggacaagcactacggatacaattcctacagcgtctccaatagcgagaaggacatcatggccgagatctacaaaaacggccccgtggagggagctttctctgtgtattcggacttcctgctctacaagtcaggagtgtaccaacacgtcaccggagagatgatgggtggccatgccatccgcatcctgggctggggagtggagaatggcacaccctactggctggttgccaactcctggaacactgactggggtgacaatggcttctttaaaatactcagaggacaggatcactgtggaatcgaatcagaagtggtggctggaattccacgcaccgatcagtactgggaaaagatctaatctgccgtgggcctgtcgtgccagtcctgggggcgagatcggggtagaaatgcattttattctttaagttcacgtaagatacaagtttcagacagggtctgaaggactggattggccaaacatcagacctgtcttccaaggagaccaagtcctggctacatcccagcctgtggttacagtgcagacaggccatgtgagccaccgctgccagcacagagcgtccttccccctgtagactagtgccgtagggagtacctgctgccccagctgactgtggccccctccgtgatccatccatctccagggagcaagacagagacgcaggaatggaaagcggagttcctaacaggatgaaagttcccccatcagttcccccagtacctccaagcaagtagctttccacatttgtcacagaaatcagaggagagatggtgttgggagccctttggagaacgccagtctcccaggccccctgcatctatcgagtttgcaatgtcacaacctctctgatcttgtgctcagcatgattctttaatagaagttttattttttcgtgcactctgctaatcatgtgggtgagccagtggaacagcgggagacctgtgctagttttacagattgcctcctaatgacgcggctcaaaaggaaaccaagtggtcaggagttgtttctgacccactgatctctactaccacaaggaaaatagtttaggagaaaccagcttttactgtttttgaaaaattacagcttcaccctgtcaagttaacaaggaatgcctgtgccaataaaagttttctccaacttgaa

SEQ ID NO: 18 - DNA, 1074 bp, Homo sapiens
ggtcaggaaagctcaggcaagcccaccctcaggcattacagctagactccgagcttactgggcagtcatctgattcgaccaacatcagttcgcagggcttaagcccagtcccttacggcggctggggagggaccaggcccaagtatataaagctccctgagggtccgcgttggctttgcgcctgtgagtgtgattcaagaacgtcccagtgcccttggctcctttcggagtgtgaccccgtgcttgcacgggacacgttacccagctcgggtgagaagggtatcttccgggaacctcgcctttaatagcacaacgagcgcagagtccactggatctgcgagaagaaaccgcgctaactagtttgtccctacggccgcctcgtagtcactgccgcggcgccttgagtctccgggccgccttgccatggctgcccgtggtgtcatcgctccagttggcgagagtttgcgctacgctgagtacttgcagccctcggccaaacggccagacgccgacgtcgaccagcagggactggtaagaagtttgatagctgtaggactgggtgttgcagctcttgcatttgcaggtcgctacgcatttcggatctggaaacctctagaacaagttatcacagaaactgcaaagaagatttcaactcctagcttttcatcctactataaaggaggatttgaacagaaaatgagtaggcgagaagctggtcttattttaggtgtaagcccatctgctggcaaggctaagattagaacagctcataggagagtcatgattttgaatcacccagataaaggtggatctccttacgtagcagccaaaataaatgaagcaaaagacttgctagaaacaaccaccaaacattgatgcttaaggaccacactgaaggaaaaaaaaagaggggacttcgaaaaaaaaaaaagccctgcaaaatattctaaaacatggtcttcttaattttctatatggattgaccacagtcttatcttccaccattaagctgtataacaataaaatgttaatagtcttgctttttattatcttttaaagatctccttaaattct

SEQ ID NO: 19 - DNA, 4098 bp, Homo sapiens
ggtggcctctgtggccgtccaggctagcggcggcccgcaggcggcggggagaaagactctctcacctggtcttgcggctgtggccaccgccggccaggggtgtggagggcgtgctgccggagacgtccgccgggctctgcagttccgccgggggtcgggcagctatggagccgcggcccacggcgccctcctccggcgccccgggactggccggggtcggggagacgccgtcagccgctgcgctggccgcagccagggtggaactgcccggcacggctgtgccctcggtgccggaggatgctgcgcccgcgagccgggacggcggcggggtccgcgatgagggccccgcggcggccggggacgggctgggcagacccttggggcccaccccgagccagagccgtttccaggtggacctggtttccgagaacgccgggcgggccgctgctgcggcggcggcggcggcggcggcagcggcggcggctggtgctggggcgggggccaagcagacccccgcggacggggaagccagcggcgagagcgagccagctaaaggcagcgaggaagccaagggccgcttccgcgtgaacttcgtggacccagctgcctcctcgtcggctgaagacagcctgtcagatgctgccggggtcggagtcgacgggcccaacgtgagcttccagaacggcggggacacggtgctgagcgagggcagcagcctgcactccggcggcggcggcggcagtgggcaccaccagcactactattatgatacccacaccaacacctactacctgcgcaccttcggccacaacaccatggacgctgtgcccaggatcgatcactaccggcacacagccgcgcagctgggcgagaagctgctccggcctagcctggcggagctccacgacgagctggaaaaggaaccttttgaggatggctttgcaaatggggaagaaagtactccaaccagagatgctgtggtcacgtatactgcagaaagtaaaggagtcgtgaagtttggctggatcaagggtgtattagtacgttgtatgttaaacatttggggtgtgatgcttttcattagattgtcatggattgtgggtcaagctggaataggtctatcagtccttgtaataatgatggccactgttgtgacaactatcacaggattgtctacttcagcaatagcaactaatggatttgtaagaggaggaggagcatattatttaatatctagaagtctagggccagaatttggtggtgcaattggtctaatcttcgcctttgccaacgctgttgcagttgctatgtatgtggttggatttgcagaaaccgtggtggagttgcttaaggaacattccatacttatgatagatgaaatcaatgatatccgaattattggagccattacagtcgtgattcttttaggtatctcagtagctggaatggagtgggaagcaaaagctcagattgttcttttggtgatcctacttcttgctattggtgatttcgtcataggaacatttatcccactggagagcaagaagccaaaagggttttttggttataaatctgaaatatttaatgagaactttgggcccgattttcgagaggaagagactttcttttctgtatttgccatcttttttcctgctgcaactggtattctggctggagcaaatatctcaggtgatcttgcagatcctcagtcagccatacccaaaggaacactcctagccattttaattactacattggtttacgtaggaattgcagtatctgtaggttcttgtgttgttcgagatgccactggaaacgttaatgacactatcgtaacagagctaacaaactgtacttctgcagcctgcaaattaaactttgatttttcatcttgtgaaagcagtccttgttcctatggcctaatgaacaacttccaggtaatgagtatggtgtcaggatttacaccactaatttctgcaggtatattttcagccactctttcttcagcattagcatccctagtgagtgctcccaaaatatttcaggctctatgtaaggacaacatctacccagctttccagatgtttgctaaaggttatgggaaaaataatgaacctcttcgtggctacatcttaacattcttaattgcacttggattcatcttaattgctgaactgaatgttattgcaccaattatctcaaacttcttccttgcatcatatgcattgatcaatttttcagtattccatgcatcacttgcaaaatctccaggatggcgtcctgcattcaaatactacaacatgtggatatcacttcttggagcaattctttgttgcatagtaatgttcgtcattaactggtgggctgcattgctaacatatgtgatagtccttgggctgtatatttatgttacctacaaaaaaccagatgtgaattggggatcctctacacaagccctgacttacctgaatgcactgcagcattcaattcgtctttctggagtggaagaccacgtgaaaaactttaggccacagtgtcttgttatgacaggtgctccaaactcacgtccagctttacttcatcttgttcatgatttcacaaaaaatgttggtttgatgatctgtggccatgtacatatgggtcctcgaagacaagccatgaaagagatgtccatcgatcaagccaaatatcagcgatggcttattaagaacaaaatgaaggcattttatgctccagtacatgcagatgacttgagagaaggtgcacagtatttgatgcaggctgctggtcttggtcgtatgaagccaaacacacttgtccttggatttaagaaagattggttgcaagcagatatgagggatgtggatatgtatataaacttatttcatgatgcttttgacatacaatatggagtagtggttattcgcctaaaagaaggtctggatatatctcatcttcaaggacaagaagaattattgtcatcacaagagaaatctcctggcaccaaggatgtggtagtaagtgtggaatatagtaaaaagtccgatttagatacttccaaaccactcagtgaaaaaccaattacacacaaagttgaggaagaggatggcaagactgcaactcaaccactgttgaaaaaagaatccaaaggccctattgtgcctttaaatgtagctgaccaaaagcttcttgaagctagtacacagtttcagaaaaaacaaggaaagaatactattgatgtctggtggctttttgatgatggaggtttgaccttattgataccttaccttctgacgaccaagaaaaaatggaaagactgtaagatcagagtattcattggtggaaagataaacagaatagaccatgaccggagagcgatggctactttgcttagcaagttccggatagacttttctgatatcatggttctaggagatatcaataccaaaccaaagaaagaaaatattatagcttttgaggaaatcattgagccatacagacttcatgaagatgataaagagcaagatattgcagataaaatgaaagaagatgaaccatggcgaataacagataatgagcttgaactttataagaccaagacataccggcagatcaggttaaatgagttattaaaggaacattcaagcacagctaatattattgtcatgagtctcccagttgcacgaaaaggtgctgtgtctagtgctctctacatggcatggttagaagctctatctaaggacctaccaccaatcctcctagttcgtgggaatcatcagagtgtccttaccttctattcataaatgttctatacagtggacagccctccagaatggtacttcagtgcctagtgtagtaacctgaaatcttcaatgacacattaacatcacaatggcgaatggtgacttttctttcacgatttcattaatttgaaagcacacaggaaagcttgctccattgataacgtgtatggagacttcggttttagtcaattccatatctcaatcttaatggtgattcttctctgttgaactgaagtttgtgagagtagttttcctttgctacttgaatagcaataaaagcgtgttaactttttgg

SEQ ID NO: 20 - DNA, 3120 bp, Homo sapiens
aaaggaaacacaagttgcttttgataacacatgatgcaaagaaagaattagaaagaatgagcaatgaagccggtataaatgacaaacaagtgtccaaaggcccaagaagttactaccaaaagctttcaaacaatattggtttatctttaaagacacatccatagcatactttaaaaataaggaacttgaacaaggagaaccacaagaaaaactaaatcttagaggctgcgaagttgtgcccgatgtaaatgtagcaggaagaaaatttggaatcaagttactaatccctgttgccgatggtatgaatgaaatgtatttgagatgtgaccatgagaatcaatacgcccaatggatggctgcctgcatgttggcatcgaagggcaaaaccatggcagacagctcctaccagccagaggtcctcaacatcctttcatttctgaggatgaaaaacaggaactctgcatctcaggtggcttccagtctcgaaaacatggatatgaacccagaatgttttgtgtcaccacggtgtgcaaaaagacacaaatccaaacagctggccgcccggatcctggaggcgcaccagaacgtggcccagatgcccctggtcgaagccaagctgcggttcatccaggcgtggcagtcactgcctgagtttggcctcacctactaccttgtcagatttaaaggaagcaaaaaagatgacattctgggagtttcatataacaggttgattaaaattgatgcagccaccgggattccagtgacaacatggagattcacaaatatcaaacagtggaatgtaaactgggaaacccggcaggtggtcatcgagtttgaccaaaacgtctttactgctttcacctgcctgagtgcagattgcaagattgtgcacgagtacattggcggctacattttcttgtccacccgctccaaggaccagaatgaaacactcgatgaggacttgttccacaaattgaccggcggtcaggattgaaacaagcacgcgtgctcggctcacaccaacaaggcaagccaaaggcgcccctccccagagggatccctaacgtgcccagcatgtagattctggactaacagacaacatacattcaccgctggtcacccagatcctcattcaaacccactgctggcacatccctttccttactttgccctgtgctaccagccacggaaggagcctctcttgttttttctataaaatgggtaggcaggagaaaagcaggtgccctaagattgctctaaggcccagcatgtggttacagttctctgacttgcagaacctgccaggtgtatggctacaagttatcctcgtgctgatctgtctcattactaagtcaatggagaagacagaaaggtaaaaatcacgtgtagcaagaacaactcttatttcacaaactcaggtatgaaacgaaacgcctgtccttcatggaactgcttttagctcctgtcttttcaaaatggcagagggagttcctacacacactttttccctggaggccaaggtctaggggtagaaaggggaggggtggggctaccaggtagcagttgacaacccaaggtcagaggagtggccctcagtgtcatctgtccacagtgatacctgccaagatgaccactgacccacatctggtcttagtcattggtctcctcagatttctggggccacctgcaagccccattccattcctacagatctctcagccacctgtaagtcctttgtgaagatgtgggtgacacagggggacaggaaaacccatttctcaacccagatccatgtctccactgcttctactctgggttgggattcaggaagacaggcacagtcctctctgttcatagaaacacctgccagtgtcaaggattccagtcaggtgtctatcccaactggtcagggagagaagggcagacccattctcaaagaccaccatgttcaaggtctgacagctccccactggctgcccccacaggggctttaggctggtctgggtcatggggaagcgtccctcttatcgctggtctgtgttctcctggatttggtatctatgttggtacgactcctggccttttatctaaaggactttggcttttgtaaatcacaagccaataatagacttttttctccccctctgttttttgctgtgtcatctctgccttgagactgccttgagacagtgcttgccctgagagagtgagccaattaacagctgcctgaattgtcattttccattttggtttgttagaggtgggaggggtgggttttgagaaggtcaaaagcaataccagaagtaaagggaaatatcagacaatattttattattttttcatagatgttctgccacacaaagaacttggggtgtaaggataaggcaaaagctccaatcccatttttcagttctcctaggatgcacccctcagggagcctggccagagttccgaggcccgtgagcgtcagctgttgctttattttccatcaaagccctctgagaagtgagacctcagcaattccgggagccacatagagacagacttggcaagggaccccctggttctgagccagtagctgccatctggaaattcctcttttagcctctccttagaggtgaatgtgaatgaagcctcccaggcacccgctgaatttctgaggccttgcttaaagctcagaagtggtttaggcatttggaaaatctggttcacatcataaagaacttgatttgaaatgttttctatagaaacaagtgctaagtgtaccgtattatacttgatgttggtcatttctcagtcctatttctcagttctattattttagaacctagtcagttctttaagattataactggtcctacattaaaataatgcttctcgatgtcagattttacctgtttgctgctgagaacatctctgcctaatttaccaaagccagaccttcagttcaacatgcttccttagcttttcatagttgtctgacatttccatgaaaacaaaggaaccaactttgttttaaccaaactttgtttggttacagttttcaggggagcgtttcttccatgacacacagcaacatcccaaagaaataaacaagtgtgacaaaaaaaaaaaaaaaaa

SEQ ID NO: 21 - DNA, 1337 bp, Homo sapiens
ctggcgtcccctttccggccggtccccatggaggcgctggggaagctgaagcagttcgatgcctaccccaagactttggaggacttccgggtcaagacctgcgggggcgccaccgtgaccattgtcagtggccttctcatgctgctactgttcctgtccgagctgcagtattacctcaccacggaggtgcatcctgagctctacgtggacaagtcgcggggagataaactgaagatcaacatcgatgtactttttccgcacatgccttgtgcctatctgagtattgatgccatggatgtggccggagaacagcagctggatgtggaacacaacctgttcaagcaacgactagataaagatggcatccccgtgagctcagaggctgagcggcatgagcttgggaaagtcgaggtgacggtgtttgaccctgactccctggaccctgatcgctgtgagagctgctatggtgctgaggcagaagatatcaagtgctgtaacacctgtgaagatgtgcgggaggcatatcgccgtagaggctgggccttcaagaacccagatactattgagcagtgccggcgagagggcttcagccagaagatgcaggagcagaagaatgaaggctgccaggtgtatggcttcttggaagtcaataaggtggccggaaacttccactttgcccctgggaagagcttccagcagtcccatgtgcacgtccatgacttgcagagctttggccttgacaacatcaacatgacccactacatccagcacctgtcatttggggaggactatccaggcattgtgaaccccctggaccacaccaatgtcactgcgccccaagcctccatgatgttccagtactttgtgaaggtggtgcccactgtgtacatgaaggtggacggagaggtactgaggacaaatcagttctctgtgaccagacatgagaaggttgccaatgggctgttgggcgaccaaggccttcccggagtcttcgtcctctatgagctctcgcccatgatggtgaagctgacggagaagcacaggtccttcacccacttcctgacaggtgtgtgcgccatcattgggggcatgttcacagtggctggactcatcgattcgctcatctaccactcagcacgagccatccagaagaaaattgatctagggaagacaacgtagtcaccctcggtgcttcctctgtctcctctttctccctggcctgtggttgtcccccagcctctgccaccctccacctcctcggtcagccccagccccaggttgataaatctattgattgattgtgatagtaaaaaaaaaaaaaaaaaaaaaaaaaaaaa

SEQ ID NO: 22 - DNA, 2908 bp, Homo sapiens
ctgctcgcggcgccgcctcctgctcctcccgctgctgctgccgctgccgccctgagtcactgcctgcgcagctccggccgcctggctccccatactagtcgccgatatttggagttcttacaacatggcagacattgacaacaaagaacagtctgaacttgatcaagatttggatgatgttgaagaagtagaagaagaggaaactggtgaagaaacaaaactcaaagcacgtcagctaactgttcagatgatgcaaaatcctcagattcttgcagcccttcaagaaagacttgatggtctggtagaaacaccaacaggatacattgaaagcctgcctagggtagttaaaagacgagtgaatgctctcaaaaacctgcaagttaaatgtgcacagatagaagccaaattctatgaggaagttcacgatcttgaaaggaagtatgctgttctctatcagcctctatttgataagcgatttgaaattattaatgcaatttatgaacctacggaagaagaatgtgaatggaaaccagatgaagaagatgagatttcggaggaattgaaagaaaaggccaagattgaagatgagaaaaaggatgaagaaaaagaagaccccaaaggaattcctgaattttggttaactgtttttaagaatgttgacttgctcagtgatatggttcaggaacacgatgaacctattctgaagcacttgaaagatattaaagtgaagttctcagatgctggccagcctatgagttttgtcttagaatttcactttgaacccaatgaatattttacaaatgaagtgctgacaaagacatacaggatgaggtcagaaccagatgattctgatcccttttcttttgatggaccagaaattatgggttgtacagggtgccagatagattggaaaaaaggaaagaatgtcactttgaaaactattaagaagaagcagaaacacaagggacgtgggacagttcgtactgtgactaaaacagtttccaatgactctttctttaacttttttgcccctcctgaagttcctgagagtggagatctggatgatgatgctgaagctatccttgctgcagacttcgaaattggtcactttttacgtgagcgtataatcccaagatcagtgttatattttactggagaagctattgaagatgatgatgatgattatgatgaagaaggtgaagaagcggatgaggaaggggaagaagaaggagatgaggaaaatgatccagactatgacccaaagaaggatcaaaacccagcagagtgcaagcagcagtgaagcaggatgtatgtggccttgaggataacctgcactggtctaccttctgcttccctggaaaggatgaatttacatcatttgacaagcctattttcaagttatttgttgtttgtttgcttgtttttgtttttgcagctaaaataaaaatttcaaatacaattttagttcttacaagataatgtcttaattttgtaccaattcaggtagaagtagaggcctaccttgaattaagggttatactcagtttttaacacattgttgaagaaaaggtaccagctttggaacgagatgctatactaataagcaagtgtaaaaaaaaaaaaaaaagaggaagaaaatcttaagtgattgatgctgttttcttttaaaaaaaaaaaaaaaaattcattttctttgggttagagctagagagaaggccccaagcttctatggtttcttctaattcttattgcttaaagtatgagtatgtcacttacccgtgcttctgtttactgtgtaattaaaatgggtagtactgtttacctaactacctcatggatgtgttaaggcatattgagttaaatctcatataatgtttctcaatcttgttaaaagctcaaaattttgggcctatttgtaatgccagtgtgacactaagcattttgttcacaccacgctttgataactaaactggaaaacaaaggtgttaagtacctctgttctggatctgggcagtcagcactctttttagatctttgtgtggctcctatttttatagaagtggagggatgcactatttcacaaggtccaagatttgttttcagatatttttgatgactgtattgtaaatactacagggatagcactatagtattgtagtcatgagacttaaagtggaaataagactatttttgacaaaagatgccattaaatttcagactgtagagccacatttacaatacctcaggctaattactgttaattttggggttgaactttttttgacagtgagggtggattattggattgtcattagaggaaggtctagatttcctgctcttaataaaattacattgaattgatttttagaggtaatgaaaacttcctttctgagaagttagtgttaaggtcttggaatgtgaacacattgtttgtagtgctatccattcctctcctgagattttaacttactactggaaatccttaaccaattataatagctttttttctttattttcaaaatgatttcctttgctttgattagacactatgtgctttttttttttaaccatagttcatcgaaatgcagctttttctgaacttcaaagatagaatcccatttttaatgaactgaagtagcaaaatcatctttttcattctttaggaaatagctattgccaaagtgaaggtgtagataatacctagtcttgttacataaaggggatgtggtttgcagaagaattttctttataaaattgaagttttaagggacgtcagtgtttatgccatttttccagttccaaaatgattccattccattctagaaatttgaagtatgtaacctgaaatccttaataaaatttggatttaattttataaaaaaaaaaaaaaaaaaaaaaaaaaaaaaaa

SEQ ID NO: 23 - DNA, 3213 bp, Homo sapiens
agagactcaagatgattccctttttacccatgttttctctactattgctgcttattgttaaccctataaacgccaacaatcattatgacaagatcttggctcatagtcgtatcaggggtcgggaccaaggcccaaatgtctgtgcccttcaacagattttgggcaccaaaaagaaatacttcagcacttgtaagaactggtataaaaagtccatctgtggacagaaaacgactgttttatatgaatgttgccctggttatatgagaatggaaggaatgaaaggctgcccagcagttttgcccattgaccatgtttatggcactctgggcatcgtgggagccaccacaacgcagcgctattctgacgcctcaaaactgagggaggagatcgagggaaagggatccttcacttactttgcaccgagtaatgaggcttgggacaacttggattctgatatccgtagaggtttggagagcaacgtgaatgttgaattactgaatgctttacatagtcacatgattaataagagaatgttgaccaaggacttaaaaaatggcatgattattccttcaatgtataacaatttggggcttttcattaaccattatcctaatggggttgtcactgttaattgtgctcgaatcatccatgggaaccagattgcaacaaatggtgttgtccatgtcattgaccgtgtgcttacacaaattggtacctcaattcaagacttcattgaagcagaagatgacctttcatcttttagagcagctgccatcacatcggacatattggaggcccttggaagagacggtcacttcacactctttgctcccaccaatgaggcttttgagaaacttccacgaggtgtcctagaaaggttcatgggagacaaagtggcttccgaagctcttatgaagtaccacatcttaaatactctccagtgttctgagtctattatgggaggagcagtctttgagacgctggaaggaaatacaattgagataggatgtgacggtgacagtataacagtaaatggaatcaaaatggtgaacaaaaaggatattgtgacaaataatggtgtgatccatttgattgatcaggtcctaattcctgattctgccaaacaagttattgagctggctggaaaacagcaaaccaccttcacggatcttgtggcccaattaggcttggcatctgctctgaggccagatggagaatacactttgctggcacctgtgaataatgcattttctgatgatactctcagcatggttcagcgcctccttaaattaattctgcagaatcacatattgaaagtaaaagttggccttaatgagctttacaacgggcaaatactggaaaccatcggaggcaaacagctcagagtcttcgtatatcgtacagctgtctgcattgaaaattcatgcatggagaaagggagtaagcaagggagaaacggtgcgattcacatattccgcgagatcatcaagccagcagagaaatccctccatgaaaagttaaaacaagataagcgctttagcaccttcctcagcctacttgaagctgcagacttgaaagagctcctgacacaacctggagactggacattatttgtgccaaccaatgatgcttttaagggaatgactagtgaagaaaaagaaattctgatacgggacaaaaatgctcttcaaaacatcattctttatcacctgacaccaggagttttcattggaaaaggatttgaacctggtgttactaacattttaaagaccacacaaggaagcaaaatctttctgaaagaagtaaatgatacacttctggtgaatgaattgaaatcaaaagaatctgacatcatgacaacaaatggtgtaattcatgttgtagataaactcctctatccagcagacacacctgttggaaatgatcaactgctggaaatacttaataaattaatcaaatacatccaaattaagtttgttcgtggtagcaccttcaaagaaatccccgtgactgtctatacaactaaaattataaccaaagttgtggaaccaaaaattaaagtgattgaaggcagtcttcagcctattatcaaaactgaaggacccacactaacaaaagtcaaaattgaaggtgaacctgaattcagactgattaaagaaggtgaaacaataactgaagtgatccatggagagccaattattaaaaaatacaccaaaatcattgatggagtgcctgtggaaataactgaaaaagagacacgagaagaacgaatcattacaggtcctgaaataaaatacactaggatttctactggaggtggagaaacagaagaaactctgaagaaattgttacaagaagaggtcaccaaggtcaccaaattcattgaaggtggtgatggtcatttatttgaagatgaagaaattaaaagactgcttcagggagacacacccgtgaggaagttgcaagccaacaaaaaagttcaaggttctagaagacgattaagggaaggtcgttctcagtgaaaatccaaaaaccagaaaaaaatgtttatacaaccctaagtcaataacctgaccttagaaaattgtgagagccaagttgacttcaggaactgaaacatcagcacaaagaagcaatcatcaaataattctgaacacaaatttaatatttttttttctgaatgagaaacatgagggaaattgtggagttagcctcctgtggtaaaggaattgaagaaaatataacaccttacaccctttttcatcttgacattaaaagttctggctaactttggaatccattagagaaaaatccttgtcaccagattcattacaattcaaatcgaagagttgtgaactgttatcccattgaaaagaccgagccttgtatgtatgttatggatacataaaatgcacgcaagccattatctctccatgggaagctaagttataaaaataggtgcttggtgtacaaaactttttatatcaaaaggctttgcacatttctatatgagtgggtttactggtaaattatgttattttttacaactaattttgtactctcagaatgtttgtcatatgcttcttgcaatgcatattttttaatctcaaacgtttcaataaaaccatttttcagatataaagagaattacttcaaattgagtaattcagaaaaactcaagatttaagttaaaaagtggtttggacttgggaa

SEQ ID NO: 24 - DNA, 10558 bp, Homo sapiens
cagtttggagctcagtcttccaccaaaggccgttcagttctcctgggctccagcctcctgcaaggactgcaagagttttcctccgcagctctgagtctccacttttttggtggagaaaggctgcaaaaagaaaaagagacgcagtgagtgggaaaagtatgcatcctattcaaacctaattgaatcgaggagcccagggacacacgccttcaggtttgctcaggggttcatatttggtgcttagacaaattcaaaatgaggaaacatcggcacttgcccttagtggccgtcttttgcctctttctctcaggctttcctacaactcatgcccagcagcagcaagcagatgtcaaaaatggtgcggctgctgatataatatttctagtggattcctcttggaccattggagaggaacatttccaacttgttcgagagtttctatatgatgttgtaaaatccttagctgtgggagaaaatgatttccattttgctctggtccagttcaacggaaacccacataccgagttcctgttaaatacgtatcgtactaaacaagaagtcctttctcatatttccaacatgtcttatattgggggaaccaatcagactggaaaaggattagaatacataatgcaaagccacctcaccaaggctgctggaagccgggccggtgacggagtccctcaggttatcgtagtgttaactgatggacactcgaaggatggccttgctctgccctcagcggaacttaagtctgctgatgttaacgtgtttgcaattggagttgaggatgcagatgaaggagcgttaaaagaaatagcaagtgaaccgctcaatatgcatatgttcaacctagagaattttacctcacttcatgacatagtaggaaacttagtgtcctgtgtgcattcatccgtgagtccagaaagggctggggacacggaaacccttaaagacatcacagcacaagactctgctgacattattttccttattgatggatcaaacaacaccggaagtgtcaatttcgcagtcattctcgacttccttgtaaatctccttgagaaactcccaattggaactcagcagatccgagtgggggtggtccagtttagcgatgagcccagaaccatgttttccttggacacctactccaccaaggcccaggttctgggtgcagtgaaagccctcgggtttgctggtggggagttggccaatatcggcctcgcccttgatttcgtggtggagaaccacttcacccgggcagggggcagccgcgtggaggaaggggttccccaggtgctggtcctcataagtgccgggccttctagtgacgagattcgctacggggtggtagcactgaagcaggctagcgtgttctcattcggccttggagcccaggccgcctccagggcagagcttcagcacatagctaccgatgacaacttggtgtttactgtcccggaattccgtagctttggggacctccaggagaaattactgccgtacattgttggcgtggcccaaaggcacattgtcttgaaaccgccaaccattgtcacacaagtcattgaagtcaacaagagagacatagtcttcctggtggatggctcatctgcactgggactggccaacttcaatgccatccgagacttcattgctaaagtcatccagaggctggaaatcggacaggatcttatccaggtggcagtggcccagtatgcagacactgtgaggcctgaattttatttcaatacccatccaacaaaaagggaagtcataaccgctgtgcggaaaatgaagcccctggacggctcggccctgtacacgggctctgctctagactttgttcgtaacaacctattcacgagttcagccggctaccgggctgccgaggggattcctaagcttttggtgctgatcacaggtggtaagtccctagatgaaatcagccagcctgcccaggagctgaagagaagcagcataatggcctttgccattgggaacaagggtgccgatcaggctgagctggaagagatcgctttcgactcctccctggtgttcatcccagctgagttccgagccgccccattgcaaggcatgctgcctggcttgctggcacctctcaggaccctctctggaacccctgaagttcactcaaacaaaagagatatcatctttcttttggatggatcagccaacgttggaaaaaccaatttcccttatgtgcgcgactttgtaatgaacctagttaacagccttgatattggaaatgacaatattcgtgttggtttagtgcaatttagtgacactcctgtaacggagttctctttaaacacataccagaccaagtcagatatccttggtcatctgaggcagctgcagctccagggaggttcgggcctgaacacaggctcagccctaagctatgtctatgccaaccacttcacggaagctggcggcagcaggatccgtgaacacgtgccgcagctcctgcttctgctcacagctgggcagtctgaggactcctatttgcaagctgccaacgccttgacacgcgcgggcatcctgactttttgtgtgggagctagccaggcgaataaggcagagcttgagcagattgcttttaacccaagcctggtgtatctcatggatgatttcagctccctgccagctttgcctcagcagctgattcagcccctaaccacatatgttagtggaggtgtggaggaagtaccactcgctcagccagagagcaagcgagacattctgttcctctttgacggctcagccaatcttgtgggccagttccctgttgtccgtgactttctctacaagattatcgatgagctcaatgtgaagccagaggggacccgaattgcggtggctcagtacagcgatgatgtcaaggtggagtcccgttttgatgagcaccagagtaagcctgagatcctgaatcttgtgaagagaatgaagatcaagacgggcaaagccctcaacctgggctacgcgctggactatgcacagaggtacatttttgtgaagtctgctggcagccggatcgaggatggagtgcttcagttcctggtgctgctggtcgcaggaaggtcatctgaccgtgtggatgggccagcaagtaacctgaagcagagtggggttgtgcctttcatcttccaagccaagaacgcagaccctgctgagttagagcagatcgtgctgtctccagcgtttatcctggctgcagagtcgcttcccaagattggagatcttcatccacagatagtgaatctcttaaaatcagtgcacaacggagcaccagcaccagtttcaggtgaaaaggacgtggtgtttctgcttgatggctctgagggcgtcaggagcggcttccctctgttgaaagagtttgtccagagagtggtggaaagcctggatgtgggccaggaccgggtccgcgtggccgtggtgcagtacagcgaccggaccaggcccgagttctacctgaattcatacatgaacaagcaggacgtcgtcaacgctgtccgccagctgaccctgctgggagggccgacccccaacaccggggccgccctggagtttgtcctgaggaacatcctggtcagctctgcgggaagcaggataacagaaggtgtgccccagctgctgatcgtcctcacggccgacaggtctggggatgatgtgcggaacccctccgtggtcgtgaagaggggtggggctgtgcccattggcattggcatcgggaacgctgacatcacagagatgcagaccatctccttcatcccggactttgccgtggccattcccacctttcgccagctggggaccgtccaacaggtcatctctgagagggtgacccagctcacccgcgaggagctgagcaggctgcagccggtgttgcagcctctaccgagcccaggtgttggtggcaagagggacgtggtctttctcatcgatgggtcccaaagtgccgggcctgagttccagtacgttcgcaccctcatagagaggctggttgactacctggacgtgggctttgacaccacccgggtggctgtcatccagttcagcgatgaccccaaggcggagttcctgctgaacgcccattccagcaaggatgaagtgcagaacgcggtgcagcggctgaggcccaagggagggcggcagatcaacgtgggcaatgccctggagtacgtgtccaggaacatcttcaagaggcccctggggagccgcattgaagagggcgtcccacagttcctggtcctcatctcgtctggaaagtctgacgatgaggtggtcgtcccggcggtggagctcaagcagtttggcgtggcccctttcacgatcgccaggaacgcagaccaggaggagctggtgaagatctcgctgagccccgaatatgtgttctcggtgagcaccttccgggagctgcccagcctggagcagaaactgctgacgcccatcacgaccctgacctcagagcagatccagaagctcttagccagcactcgctatccacctccagcagttgagagtgatgctgcagacattgtctttctgatcgacagctctgagggagttaggccagatggctttgcacatattcgagattttgttagcaggattgttcgaagactcaacatcggccccagtaaagtgagagttggggtcgtgcagttcagcaatgatgtcttcccagaattctatctgaaaacctacagatcccaggccccggtgctggacgccatacggcgcctgaggctcagaggggggtccccactgaacactggcaaggctctcgaatttgtggcaagaaacctctttgttaagtctgcggggagtcgcatagaagacggggtgccccaacacctggtcctggtcctgggtggaaaatcccaggacgatgtgtccaggttcgcccaggtgatccgttcctcgggcattgtgagtttaggggtaggagaccggaacatcgacagaacagagctgcagaccatcaccaatgaccccagactggtcttcacagtgcgagagttcagagagcttcccaacatagaagaaagaatcatgaactcgtttggaccctccgcagccactcctgcacctccaggggtggacacccctcctccttcacggccagagaagaagaaagcagacattgtgttcctgttggatggttccatcaacttcaggagggacagtttccaggaagtgcttcgttttgtgtctgaaatagtggacacagtttatgaagatggcgactccatccaagtggggcttgtccagtacaactctgaccccactgacgaattcttcctgaaggacttctctaccaagaggcagattattgacgccatcaacaaagtggtctacaaagggggaagacacgccaacactaaggtgggccttgagcacctgcgggtaaaccactttgtgcctgaggcaggcagccgcctggaccagcgggtccctcagattgcctttgtgatcacgggaggaaagtcggtggaagatgcacaggatgtgagcctggccctcacccagaggggggtcaaagtgtttgctgttggagtgaggaatatcgactcggaggaggttggaaagatagcgtccaacagcgccacagcgttccgcgtgggcaacgtccaggagctgtccgaactgagcgagcaagttttggaaactttgcatgatgcgatgcatgaaaccctttgccctggtgtaactgatgctgccaaagcttgtaatctggatgtgattctggggtttgatggttctagagaccagaatgtttttgtggcccagaagggcttcgagtccaaggtggacgccatcttgaacagaatcagccagatgcacagggtcagctgcagcggtggccgctcgcccaccgtgcgtgtgtcagtggtggccaacacgccctcgggcccggtggaggcctttgactttgacgagtaccagccagagatgctcgagaagttccggaacatgcgcagccagcacccctacgtcctcacggaggacaccctgaaggtctacctgaacaagttcagacagtcctcgccggacagcgtgaaggtggtcattcattttactgatggagcagacggagatctggctgatttacacagagcatctgagaacctccgccaagaaggagtccgtgccttgatcctggtgggccttgaacgagtggtcaacttggagcggctaatgcatctggagtttgggcgagggtttatgtatgacaggcccctgaggcttaacttgctggacttggattatgaactagcggagcagcttgacaacattgccgagaaagcttgctgtggggttccctgcaagtgctctgggcagaggggagaccgcgggcccatcggcagcatcgggccaaagggtattcctggagaagacggctaccgaggctatcctggtgatgagggtggacccggtgagcgtggtccgcctggtgtgaacggcactcaaggtttccagggctgcccgggccagagaggagtaaagggctctcggggattcccaggagagaagggcgaagtaggagaaattggactggatggtctggatggtgaagatggagacaaaggattgcctggttcttctggagagaaagggaatcctggaagaaggggtgataaaggacctcgaggagagaaaggagaaagaggagatgttgggattcgaggggacccgggtaacccaggacaagacagccaggagagaggacccaaaggagaaaccggtgacctcggccccatgggtgtcccagggagagatggagtacctggaggacctggagaaactgggaagaatggtggctttggccgaaggggaccccccggagctaagggcaacaagggcggtcctggccagccgggctttgagggagagcaggggaccagaggtgcacagggcccagctggtcctgctggtcctccagggctgataggagaacaaggcatttctggacctaggggaagcggaggtgcccgtggcgctcctggagaacgaggcagaaccggtccactgggaagaaagggtgagcccggagagccaggaccaaaaggaggaatcgggaacccgggccctcgtggggagacgggagatgacgggagagacggagttggcagtgaaggacgcagaggcaaaaaaggagaaagaggatttcctggatacccaggaccaaagggtaacccaggtgaacctgggctaaatggaacaacaggacccaaaggcatcagaggccgaaggggaaattcgggacctccagggatagttggacagaaggggagacctggctacccaggaccagctggtccaaggggcaacaggggcgactccatcgatcaatgtgccctcatccaaagcatcaaagataaatgcccttgctgttacgggcccctggagtgccccgtcttcccaacagaactagcctttgctttagacacctctgagggagtcaaccaagacactttcggccggatgcgagatgtggtcttgagtattgtgaatgtcctgaccattgctgagagcaactgcccgacgggggcccgggtggctgtggtcacctacaacaacgaggtgaccacggagatccggtttgctgactccaagaggaagtcggtcctcctggacaagattaagaaccttcaggtggctctgacatccaaacagcagagtctggagactgccatgtcgtttgtggccaggaacacatttaagcgtgtgaggaacggattcctaatgaggaaagtggctgttttcttcagcaacacacccacaagagcatccccacagctcagagaggctgtgctcaaactctcagatgcggggatcacccccttgttccttacaaggcaggaagaccggcagctcatcaacgctttgcagatcaataacacagcagtggggcatgcgcttgtcctgcctgcagggagagacctcacagacttcctggagaatgtcctcacgtgtcatgtttgcttggacatctgcaacatcgacccatcctgtggatttggcagttggaggccttccttcagggacaggagagcggcagggagtgatgtggacatcgacatggctttcatcttagacagcgctgagaccaccaccctgttccagttcaatgagatgaagaagtacatagcgtacctggtcagacaactggacatgagcccagatcccaaggcctcccagcacttcgccagagtggcagttgtgcagcacgcgccctctgagtccgtggacaatgccagcatgccacctgtgaaggtggaattctccctgactgactatggctccaaggagaagctggtggacttcctcagcaggggaatgacacagttgcagggaaccagggccttaggcagtgccattgaatacaccatagagaatgtctttgaaagtgccccaaacccacgggacctgaaaattgtggtcctgatgctgacgggcgaggtgccggagcagcagctggaggaggcccagagagtcatcctgcaggccaaatgcaagggctacttcttcgtggtcctgggcattggcaggaaggtgaacatcaaggaggtatacaccttcgccagtgagccaaacgacgtcttcttcaaattagtggacaagtccaccgagctcaacgaggagcctttgatgcgcttcgggaggctgttgccgtccttcgtcagcagtgaaaatgctttttacttgtccccagatatcaggaaacagtgtgattggttccaaggggaccaacccacaaagaaccttgtgaagtttggtcacaaacaagtaaatgttccgaataacgttacttcaagtcctacatccaacccagtgacgacaacgaagccggtgactacgacgaagccggtgaccaccacaacaaagcctgtaaccaccacaacaaagcctgtgactattataaatcagccatctgtgaagccagccgctgcaaagccggcccctgcgaaacctgtggctgccaagcctgtggccacaaagacggccactgttagacccccagtggcggtgaagccagcaacagcagcgaagcctgtagcagcaaagccagcagctgtaagaccccccgctgctgctgcaaaaccagtggcgaccaagcctgaggtccctaggccacaggcagccaaaccagctgccaccaagccagccaccactaagcccgtggttaagatgctccgtgaagtccaggtgtttgagataacagagaacagcgccaaactccactgggagaggcctgagccccccggtccttatttttatgacctcaccgtcacctcagcccatgatcagtccctggttctgaagcagaacctcacggtcacggaccgcgtcattggaggcctgctcgctgggcagacataccatgtggctgtggtctgctacctgaggtctcaggtcagagccacctaccacggaagtttcagtacaaagaaatctcagcccccacctccacagccagcaaggtcagcttctagttcaaccatcaatctaatggtgagcacagaaccattggctctcactgaaacagatatatgcaagttgccgaaagacgaaggaacttgcagggatttcatattaaaatggtactatgatccaaacaccaaaagctgtgcaagattctggtatggaggttgtggtggaaacgaaaacaaatttggatcacagaaagaatgtgaaaaggtttgcgctcctgtgctcgccaaacccggagtcatcagtgtgatgggaacctaagcgtgggtggccaacatcatatacctcttgaagaagaaggagtcagccatcgccaacttgtctctgtagaagctccgggtgtagattcccttgcactgtatcatttcatgctttgatttacactcgaactcgggagggaacatcctgctgcatgacctatcagtatggtgctaatgtgtctgtggaccctcgctctctgtctccagcagttctctcgaatactttgaatgttgtgtaacagttagccactgctggtgtttatgtgaacattcctatcaatccaaattccctctggagtttcatgttatgcctgttgcaggcaaatgtaaagtctagaaaataatgcaaatgtcacggctactctatatacttttgcttggttcattttttttcccttttagttaagcatgactttagatgggaagcctgtgtatcgtggagaaacaagagaccaactttttcattccctgcccccaatttcccagactagatttcaagctaattttctttttctgaagcctctaacaaatgatctagttcagaaggaagcaaaatcccttaatctatgtgcaccgttgggaccaatgccttaattaaagaatttaaaaaagttgtaatagagaatatttttggcattcctctcaatgttgtgtgttttttttttttgtgtgctggagggaggggatttaattttaattttaaaatgtttaggaaatttatacaaagaaactttttaataaagtatattgaaagtttaaaaaaaaaaaaaaaa

SEQ ID NO: 25 - DNA, 2133 bp, Homo sapiens
cgggagagcgcgctctgcctgccgcctgcctgcctgccactgagggttcccagcaccatgagggcctggatcttctttctcctttgcctggccgggagggccttggcagcccctcagcaagaagccctgcctgatgagacagaggtggtggaagaaactgtggcagaggtgactgaggtatctgtgggagctaatcctgtccaggtggaagtaggagaatttgatgatggtgcagaggaaaccgaagaggaggtggtggcggaaaatccctgccagaaccaccactgcaaacacggcaaggtgtgcgagctggatgagaacaacacccccatgtgcgtgtgccaggaccccaccagctgcccagcccccattggcgagtttgagaaggtgtgcagcaatgacaacaagaccttcgactcttcctgccacttctttgccacaaagtgcaccctggagggcaccaagaagggccacaagctccacctggactacatcgggccttgcaaatacatccccccttgcctggactctgagctgaccgaattccccctgcgcatgcgggactggctcaagaacgtcctggtcaccctgtatgagagggatgaggacaacaaccttctgactgagaagcagaagctgcgggtgaagaagatccatgagaatgagaagcgcctggaggcaggagaccaccccgtggagctgctggcccgggacttcgagaagaactataacatgtacatcttccctgtacactggcagttcggccagctggaccagcaccccattgacgggtacctctcccacaccgagctggctccactgcgtgctcccctcatccccatggagcattgcaccacccgctttttcgagacctgtgacctggacaatgacaagtacatcgccctggatgagtgggccggctgcttcggcatcaagcagaaggatatcgacaaggatcttgtgatctaaatccactccttccacagtaccggattctctctttaaccctccccttcgtgtttcccccaatgtttaaaatgtttggatggtttgttgttctgcctggagacaaggtgctaacatagatttaagtgaatacattaacggtgctaaaaatgaaaattctaacccaagacatgacattcttagctgtaacttaactattaaggccttttccacacgcattaatagtcccatttttctcttgccatttgtagctttgcccattgtcttattggcacatgggtggacacggatctgctgggctctgccttaaacacacattgcagcttcaacttttctctttagtgttctgtttgaaactaatacttaccgagtcagactttgtgttcatttcatttcagggtcttggctgcctgtgggcttccccaggtggcctggaggtgggcaaagggaagtaacagacacacgatgttgtcaaggatggttttgggactagaggctcagtggtgggagagatccctgcagaatccaccaaccagaacgtggtttgcctgaggctgtaactgagagaaagattctggggctgtcttatgaaaatatagacattctcacataagcccagttcatcaccatttcctcctttacctttcagtgcagtttcttttcacattaggctgttggttcaaacttttgggagcacggactgtcagttctctgggaagtggtcagcgcatcctgcagggcttctcctcctctgtcttttggagaaccagggctcttctcaggggctctagggactgccaggctgtttcagccaggaaggccaaaatcaagagtgagatgtagaaagttgtaaaatagaaaaagtggagttggtgaatcggttgttctttcctcacatttggatgattgtcataaggtttttagcatgttcctccttttcttcaccctcccctttgttcttctattaatcaagagaaacttcaaagttaatgggatggtcggatctcacaggctgagaactcgttcacctccaagcatttcatgaaaaagctgcttcttattaatcatacaaactctcaccatgatgtgaagagtttcacaaatctttcaaaataaaaagtaatgacttagaaactgaaaaaaaaaaaaaaaaaaaaaaaaaaaaaa

SEQ ID NO: 26 - DNA, 2691 bp, Homo sapiens
gcttgcccgtcggtcgctagctcgctcggtgcgcgtcgtcccgctccatggcgctcttcgtgcggctgctggctctcgccctggctctggccctgggccccgccgcgaccctggcgggtcccgccaagtcgccctaccagctggtgctgcagcacagcaggctccggggccgccagcacggccccaacgtgtgtgctgtgcagaaggttattggcactaataggaagtacttcaccaactgcaagcagtggtaccaaaggaaaatctgtggcaaatcaacagtcatcagctacgagtgctgtcctggatatgaaaaggtccctggggagaagggctgtccagcagccctaccactctcaaacctttacgagaccctgggagtcgttggatccaccaccactcagctgtacacggaccgcacggagaagctgaggcctgagatggaggggcccggcagcttcaccatcttcgcccctagcaacgaggcctgggcctccttgccagctgaagtgctggactccctggtcagcaatgtcaacattgagctgctcaatgccctccgctaccatatggtgggcaggcgagtcctgactgatgagctgaaacacggcatgaccctcacctctatgtaccagaattccaacatccagatccaccactatcctaatgggattgtaactgtgaactgtgcccggctcctgaaagccgaccaccatgcaaccaacggggtggtgcacctcatcgataaggtcatctccaccatcaccaacaacatccagcagatcattgagatcgaggacacctttgagacccttcgggctgctgtggctgcatcagggctcaacacgatgcttgaaggtaacggccagtacacgcttttggccccgaccaatgaggccttcgagaagatccctagtgagactttgaaccgtatcctgggcgacccagaagccctgagagacctgctgaacaaccacatcttgaagtcagctatgtgtgctgaagccatcgttgcggggctgtctgtagagaccctggagggcacgacactggaggtgggctgcagcggggacatgctcactatcaacgggaaggcgatcatctccaataaagacatcctagccaccaacggggtgatccactacattgatgagctactcatcccagactcagccaagacactatttgaattggctgcagagtctgatgtgtccacagccattgaccttttcagacaagccggcctcggcaatcatctctctggaagtgagcggttgaccctcctggctcccctgaattctgtattcaaagatggaacccctccaattgatgcccatacaaggaatttgcttcggaaccacataattaaagaccagctggcctctaagtatctgtaccatggacagaccctggaaactctgggcggcaaaaaactgagagtttttgtttatcgtaatagcctctgcattgagaacagctgcatcgcggcccacgacaagagggggaggtacgggaccctgttcacgatggaccgggtgctgacccccccaatggggactgtcatggatgtcctgaagggagacaatcgctttagcatgctggtagctgccatccagtctgcaggactgacggagaccctcaaccgggaaggagtctacacagtctttgctcccacaaatgaagccttccgagccctgccaccaagagaacggagcagactcttgggagatgccaaggaacttgccaacatcctgaaataccacattggtgatgaaatcctggttagcggaggcatcggggccctggtgcggctaaagtctctccaaggtgacaagctggaagtcagcttgaaaaacaatgtggtgagtgtcaacaaggagcctgttgccgagcctgacatcatggccacaaatggcgtggtccatgtcatcaccaatgttctgcagcctccagccaacagacctcaggaaagaggggatgaacttgcagactctgcgcttgagatcttcaaacaagcatcagcgttttccagggcttcccagaggtctgtgcgactagcccctgtctatcaaaagttattagagaggatgaagcattagcttgaagcactacaggaggaatgcaccacggcagctctccgccaatttctctcagatttccacagagactgtttgaatgttttcaaaaccaagtatcacactttaatgtacatgggccgcaccataatgagatgtgagccttgtgcatgtgggggaggagggagagagatgtactttttaaatcatgttccccctaaacatggctgttaacccactgcatgcagaaacttggatgtcactgcctgacattcacttccagagaggacctatcccaaatgtggaattgactgcctatgccaagtccctggaaaaggagcttcagtattgtggggctcataaaacatgaatcaagcaatccagcctcatgggaagtcctggcacagtttttgtaaagcccttgcacagctggagaaatggcatcattataagctatgagttgaaatgttctgtcaaatgtgtctcacatctacacgtggcttggaggcttttatggggccctgtccaggtagaaaagaaatggtatgtagagcttagatttccctattgtgacagagccatggtgtgtttgtaataataaaaccaaagaaacata

SEQ ID NO: 27 - DNA, 8027 bp, Homo sapiens
acgcccgcgccggctgtgctgcacagggggaggagagggaaccccaggcgcgagcgggaagaggggacctgcagccacaacttctctggtcctctgcatcccttctgtccctccacccgtccccttccccaccctctggcccccaccttcttggaggcgacaacccccgggaggcattagaagggatttttcccgcagttgcgaagggaagcaaacttggtggcaacttgcctcccggtgcgggcgtctctcccccaccgtctcaacatgcttaggggtccggggcccgggctgctgctgctggccgtccagtgcctggggacagcggtgccctccacgggagcctcgaagagcaagaggcaggctcagcaaatggttcagccccagtccccggtggctgtcagtcaaagcaagcccggttgttatgacaatggaaaacactatcagataaatcaacagtgggagcggacctacctaggcaatgcgttggtttgtacttgttatggaggaagccgaggttttaactgcgagagtaaacctgaagctgaagagacttgctttgacaagtacactgggaacacttaccgagtgggtgacacttatgagcgtcctaaagactccatgatctgggactgtacctgcatcggggctgggcgagggagaataagctgtaccatcgcaaaccgctgccatgaagggggtcagtcctacaagattggtgacacctggaggagaccacatgagactggtggttacatgttagagtgtgtgtgtcttggtaatggaaaaggagaatggacctgcaagcccatagctgagaagtgttttgatcatgctgctgggacttcctatgtggtcggagaaacgtgggagaagccctaccaaggctggatgatggtagattgtacttgcctgggagaaggcagcggacgcatcacttgcacttctagaaatagatgcaacgatcaggacacaaggacatcctatagaattggagacacctggagcaagaaggataatcgaggaaacctgctccagtgcatctgcacaggcaacggccgaggagagtggaagtgtgagaggcacacctctgtgcagaccacatcgagcggatctggccccttcaccgatgttcgtgcagctgtttaccaaccgcagcctcacccccagcctcctccctatggccactgtgtcacagacagtggtgtggtctactctgtggggatgcagtggctgaagacacaaggaaataagcaaatgctttgcacgtgcctgggcaacggagtcagctgccaagagacagctgtaacccagacttacggtggcaactcaaatggagagccatgtgtcttaccattcacctacaatggcaggacgttctactcctgcaccacggaagggcgacaggacggacatctttggtgcagcacaacttcgaattatgagcaggaccagaaatactctttctgcacagaccacactgttttggttcagactcgaggaggaaattccaatggtgccttgtgccacttccccttcctatacaacaaccacaattacactgattgcacttctgagggcagaagagacaacatgaagtggtgtgggaccacacagaactatgatgccgaccagaagtttgggttctgccccatggctgcccacgaggaaatctgcacaaccaatgaaggggtcatgtaccgcattggagatcagtgggataagcagcatgacatgggtcacatgatgaggtgcacgtgtgttgggaatggtcgtggggaatggacatgcattgcctactcgcagcttcgagatcagtgcattgttgatgacatcacttacaatgtgaacgacacattccacaagcgtcatgaagaggggcacatgctgaactgtacatgcttcggtcagggtcggggcaggtggaagtgtgatcccgtcgaccaatgccaggattcagagactgggacgttttatcaaattggagattcatgggagaagtatgtgcatggtgtcagataccagtgctactgctatggccgtggcattggggagtggcattgccaacctttacagacctatccaagctcaagtggtcctgtcgaagtatttatcactgagactccgagtcagcccaactcccaccccatccagtggaatgcaccacagccatctcacatttccaagtacattctcaggtggagacctaaaaattctgtaggccgttggaaggaagctaccataccaggccacttaaactcctacaccatcaaaggcctgaagcctggtgtggtatacgagggccagctcatcagcatccagcagtacggccaccaagaagtgactcgctttgacttcaccaccaccagcaccagcacacctgtgaccagcaacaccgtgacaggagagacgactcccttttctcctcttgtggccacttctgaatctgtgaccgaaatcacagccagtagctttgtggtctcctgggtctcagcttccgacaccgtgtcgggattccgggtggaatatgagctgagtgaggagggagatgagccacagtacctggatcttccaagcacagccacttctgtgaacatccctgacctgcttcctggccgaaaatacattgtaaatgtctatcagatatctgaggatggggagcagagtttgatcctgtctacttcacaaacaacagcgcctgatgcccctcctgacccgactgtggaccaagttgatgacacctcaattgttgttcgctggagcagaccccaggctcccatcacagggtacagaatagtctattcgccatcagtagaaggtagcagcacagaactcaaccttcctgaaactgcaaactccgtcaccctcagtgacttgcaacctggtgttcagtataacatcactatctatgctgtggaagaaaatcaagaaagtacacctgttgtcattcaacaagaaaccactggcaccccacgctcagatacagtgccctctcccagggacctgcagtttgtggaagtgacagacgtgaaggtcaccatcatgtggacaccgcctgagagtgcagtgaccggctaccgtgtggatgtgatccccgtcaacctgcctggcgagcacgggcagaggctgcccatcagcaggaacacctttgcagaagtcaccgggctgtcccctggggtcacctattacttcaaagtctttgcagtgagccatgggagggagagcaagcctctgactgctcaacagacaaccaaactggatgctcccactaacctccagtttgtcaatgaaactgattctactgtcctggtgagatggactccacctcgggcccagataacaggataccgactgaccgtgggccttacccgaagaggccagcccaggcagtacaatgtgggtccctctgtctccaagtaccccctgaggaatctgcagcctgcatctgagtacaccgtatccctcgtggccataaagggcaaccaagagagccccaaagccactggagtctttaccacactgcagcctgggagctctattccaccttacaacaccgaggtgactgagaccaccatcgtgatcacatggacgcctgctccaagaattggttttaagctgggtgtacgaccaagccagggaggagaggcaccacgagaagtgacttcagactcaggaagcatcgttgtgtccggcttgactccaggagtagaatacgtctacaccatccaagtcctgagagatggacaggaaagagatgcgccaattgtaaacaaagtggtgacaccattgtctccaccaacaaacttgcatctggaggcaaaccctgacactggagtgctcacagtctcctgggagaggagcaccaccccagacattactggttatagaattaccacaacccctacaaacggccagcagggaaattctttggaagaagtggtccatgctgatcagagctcctgcacttttgataacctgagtcccggcctggagtacaatgtcagtgtttacactgtcaaggatgacaaggaaagtgtccctatctctgataccatcatcccagctgttcctcctcccactgacctgcgattcaccaacattggtccagacaccatgcgtgtcacctgggctccacccccatccattgatttaaccaacttcctggtgcgttactcacctgtgaaaaatgaggaagatgttgcagagttgtcaatttctccttcagacaatgcagtggtcttaacaaatctcctgcctggtacagaatatgtagtgagtgtctccagtgtctacgaacaacatgagagcacacctcttagaggaagacagaaaacaggtcttgattccccaactggcattgacttttctgatattactgccaactcttttactgtgcactggattgctcctcgagccaccatcactggctacaggatccgccatcatcccgagcacttcagtgggagacctcgagaagatcgggtgccccactctcggaattccatcaccctcaccaacctcactccaggcacagagtatgtggtcagcatcgttgctcttaatggcagagaggaaagtcccttattgattggccaacaatcaacagtttctgatgttccgagggacctggaagttgttgctgcgacccccaccagcctactgatcagctgggatgctcctgctgtcacagtgagatattacaggatcacttacggagaaacaggaggaaatagccctgtccaggagttcactgtgcctgggagcaagtctacagctaccatcagcggccttaaacctggagttgattataccatcactgtgtatgctgtcactggccgtggagacagccccgcaagcagcaagccaatttccattaattaccgaacagaaattgacaaaccatcccagatgcaagtgaccgatgttcaggacaacagcattagtgtcaagtggctgccttcaagttcccctgttactggttacagagtaaccaccactcccaaaaatggaccaggaccaacaaaaactaaaactgcaggtccagatcaaacagaaatgactattgaaggcttgcagcccacagtggagtatgtggttagtgtctatgctcagaatccaagcggagagagtcagcctctggttcagactgcagtaaccaacattgatcgccctaaaggactggcattcactgatgtggatgtcgattccatcaaaattgcttgggaaagcccacaggggcaagtttccaggtacagggtgacctactcgagccctgaggatggaatccatgagctattccctgcacctgatggtgaagaagacactgcagagctgcaaggcctcagaccgggttctgagtacacagtcagtgtggttgccttgcacgatgatatggagagccagcccctgattggaacccagtccacagctattcctgcaccaactgacctgaagttcactcaggtcacacccacaagcctgagcgcccagtggacaccacccaatgttcagctcactggatatcgagtgcgggtgacccccaaggagaagaccggaccaatgaaagaaatcaaccttgctcctgacagctcatccgtggttgtatcaggacttatggtggccaccaaatatgaagtgagtgtctatgctcttaaggacactttgacaagcagaccagctcagggtgttgtcaccactctggagaatgtcagcccaccaagaagggctcgtgtgacagatgctactgagaccaccatcaccattagctggagaaccaagactgagacgatcactggcttccaagttgatgccgttccagccaatggccagactccaatccagagaaccatcaagccagatgtcagaagctacaccatcacaggtttacaaccaggcactgactacaagatctacctgtacaccttgaatgacaatgctcggagctcccctgtggtcatcgacgcctccactgccattgatgcaccatccaacctgcgtttcctggccaccacacccaattccttgctggtatcatggcagccgccacgtgccaggattaccggctacatcatcaagtatgagaagcctgggtctcctcccagagaagtggtccctcggccccgccctggtgtcacagaggctactattactggcctggaaccgggaaccgaatatacaatttatgtcattgccctgaagaataatcagaagagcgagcccctgattggaaggaaaaagacagacgagcttccccaactggtaacccttccacaccccaatcttcatggaccagagatcttggatgttccttccacagttcaaaagacccctttcgtcacccaccctgggtatgacactggaaatggtattcagcttcctggcacttctggtcagcaacccagtgttgggcaacaaatgatctttgaggaacatggttttaggcggaccacaccgcccacaacggccacccccataaggcataggccaagaccatacccgccgaatgtaggacaagaagctctctctcagacaaccatctcatgggccccattccaggacacttctgagtacatcatttcatgtcatcctgttggcactgatgaagaacccttacagttcagggttcctggaacttctaccagtgccactctgacaggcctcaccagaggtgccacctacaacatcatagtggaggcactgaaagaccagcagaggcataaggttcgggaagaggttgttaccgtgggcaactctgtcaacgaaggcttgaaccaacctacggatgactcgtgctttgacccctacacagtttcccattatgccgttggagatgagtgggaacgaatgtctgaatcaggctttaaactgttgtgccagtgcttaggctttggaagtggtcatttcagatgtgattcatctagatggtgccatgacaatggtgtgaactacaagattggagagaagtgggaccgtcagggagaaaatggccagatgatgagctgcacatgtcttgggaacggaaaaggagaattcaagtgtgaccctcatgaggcaacgtgttacgatgatgggaagacataccacgtaggagaacagtggcagaaggaatatctcggtgccatttgctcctgcacatgctttggaggccagcggggctggcgctgtgacaactgccgcagacctgggggtgaacccagtcccgaaggcactactggccagtcctacaaccagtattctcagagataccatcagagaacaaacactaatgttaattgcccaattgagtgcttcatgcctttagatgtacaggctgacagagaagattcccgagagtaaatcatctttccaatccagaggaacaagcatgtctctctgccaagatccatctaaactggagtgatgttagcagacccagcttagagttcttctttctttcttaagccctttgctctggaggaagttctccagcttcagctcaactcacagcttctccaagcatcaccctgggagtttcctgagggttttctcataaatgagggctgcacattgcctgttctgcttcgaagtattcaataccgctcagtattttaaatgaagtgattctaagatttggtttgggatcaataggaaagcatatgcagccaaccaagatgcaaatgttttgaaatgatatgaccaaaattttaagtaggaaagtcacccaaacacttctgctttcacttaagtgtctggcccgcaatactgtaggaacaagcatgatcttgttactgtgatattttaaatatccacagtactcactttttccaaatgatcctagtaattgcctagaaatatctttctcttacctgttatttatcaatttttcccagtatttttatacggaaaaaattgtattgaaaacacttagtatgcagttgataagaggaatttggtataattatggtgggtgattattttttatactgtatgtgccaaagctttactactgtggaaagacaactgttttaataaaagatttacattccaca

SEQ ID NO: 28 - DNA, 5084 bp, Homo sapiens
agcaccacggcagcaggaggtttcggctaagttggaggtactggccacgactgcatgcccgcgcccgccaggtgatacctccgccggtgacccaggggctctgcgacacaaggagtctgcatgtctaagtgctagacatgctcagctttgtggatacgcggactttgttgctgcttgcagtaaccttatgcctagcaacatgccaatctttacaagaggaaactgtaagaaagggcccagccggagatagaggaccacgtggagaaaggggtccaccaggccccccaggcagagatggtgaagatggtcccacaggccctcctggtccacctggtcctcctggcccccctggtctcggtgggaactttgctgctcagtatgatggaaaaggagttggacttggccctggaccaatgggcttaatgggacctagaggcccacctggtgcagctggagccccaggccctcaaggtttccaaggacctgctggtgagcctggtgaacctggtcaaactggtcctgcaggtgctcgtggtccagctggccctcctggcaaggctggtgaagatggtcaccctggaaaacccggacgacctggtgagagaggagttgttggaccacagggtgctcgtggtttccctggaactcctggacttcctggcttcaaaggcattaggggacacaatggtctggatggattgaagggacagcccggtgctcctggtgtgaagggtgaacctggtgcccctggtgaaaatggaactccaggtcaaacaggagcccgtgggcttcctggtgagagaggacgtgttggtgcccctggcccagctggtgcccgtggcagtgatggaagtgtgggtcccgtgggtcctgctggtcccattgggtctgctggccctccaggcttcccaggtgcccctggccccaagggtgaaattggagctgttggtaacgctggtcctgctggtcccgccggtccccgtggtgaagtgggtcttccaggcctctccggccccgttggacctcctggtaatcctggagcaaacggccttactggtgccaagggtgctgctggccttcccggcgttgctggggctcccggcctccctggaccccgcggtattcctggccctgttggtgctgccggtgctactggtgccagaggacttgttggtgagcctggtccagctggctccaaaggagagagcggtaacaagggtgagcccggctctgctgggccccaaggtcctcctggtcccagtggtgaagaaggaaagagaggccctaatggggaagctggatctgccggccctccaggacctcctgggctgagaggtagtcctggttctcgtggtcttcctggagctgatggcagagctggcgtcatgggccctcctggtagtcgtggtgcaagtggccctgctggagtccgaggacctaatggagatgctggtcgccctggggagcctggtctcatgggacccagaggtcttcctggttcccctggaaatatcggccccgctggaaaagaaggtcctgtcggcctccctggcatcgacggcaggcctggcccaattggcccagctggagcaagaggagagcctggcaacattggattccctggacccaaaggccccactggtgatcctggcaaaaacggtgataaaggtcatgctggtcttgctggtgctcggggtgctccaggtcctgatggaaacaatggtgctcagggacctcctggaccacagggtgttcaaggtggaaaaggtgaacagggtcccgctggtcctccaggcttccagggtctgcctggcccctcaggtcccgctggtgaagttggcaaaccaggagaaaggggtctccatggtgagtttggtctccctggtcctgctggtccaagaggggaacgcggtcccccaggtgagagtggtgctgccggtcctactggtcctattggaagccgaggtccttctggacccccagggcctgatggaaacaagggtgaacctggtgtggttggtgctgtgggcactgctggtccatctggtcctagtggactcccaggagagaggggtgctgctggcatacctggaggcaagggagaaaagggtgaacctggtctcagaggtgaaattggtaaccctggcagagatggtgctcgtggtgctcatggtgctgtaggtgcccctggtcctgctggagccacaggtgaccggggcgaagctggggctgctggtcctgctggtcctgctggtcctcggggaagccctggtgaacgtggcgaggtcggtcctgctggccccaacggatttgctggtccggctggtgctgctggtcaaccgggtgctaaaggagaaagaggagccaaagggcctaagggtgaaaacggtgttgttggtcccacaggccccgttggagctgctggcccagctggtccaaatggtccccccggtcctgctggaagtcgtggtgatggaggcccccctggtatgactggtttccctggtgctgctggacggactggtcccccaggaccctctggtatttctggccctcctggtccccctggtcctgctgggaaagaagggcttcgtggtcctcgtggtgaccaaggtccagttggccgaactggagaagtaggtgcagttggtccccctggcttcgctggtgagaagggtccctctggagaggctggtactgctggacctcctggcactccaggtcctcagggtcttcttggtgctcctggtattctgggtctccctggctcgagaggtgaacgtggtctacctggtgttgctggtgctgtgggtgaacctggtcctcttggcattgccggccctcctggggcccgtggtcctcctggtgctgtgggtagtcctggagtcaacggtgctcctggtgaagctggtcgtgatggcaaccctgggaacgatggtcccccaggtcgcgatggtcaacccggacacaagggagagcgcggttaccctggcaatattggtcccgttggtgctgcaggtgcacctggtcctcatggccccgtgggtcctgctggcaaacatggaaaccgtggtgaaactggtccttctggtcctgttggtcctgctggtgctgttggcccaagaggtcctagtggcccacaaggcattcgtggcgataagggagagcccggtgaaaaggggcccagaggtcttcctggcttaaagggacacaatggattgcaaggtctgcctggtatcgctggtcaccatggtgatcaaggtgctcctggctccgtgggtcctgctggtcctaggggccctgctggtccttctggccctgctggaaaagatggtcgcactggacatcctggtacggttggacctgctggcattcgaggccctcagggtcaccaaggccctgctggcccccctggtccccctggccctcctggacctccaggtgtaagcggtggtggttatgactttggttacgatggagacttctacagggctgaccagcctcgctcagcaccttctctcagacccaaggactatgaagttgatgctactctgaagtctctcaacaaccagattgagacccttcttactcctgaaggctctagaaagaacccagctcgcacatgccgtgacttgagactcagccacccagagtggagcagtggttactactggattgaccctaaccaaggatgcactatggatgctatcaaagtatactgtgatttctctactggcgaaacctgtatccgggcccaacctgaaaacatcccagccaagaactggtataggagctccaaggacaagaaacacgtctggctaggagaaactatcaatgctggcagccagtttgaatataatgtagaaggagtgacttccaaggaaatggctacccaacttgccttcatgcgcctgctggccaactatgcctctcagaacatcacctaccactgcaagaacagcattgcatacatggatgaggagactggcaacctgaaaaaggctgtcattctacagggctctaatgatgttgaacttgttgctgagggcaacagcaggttcacttacactgttcttgtagatggctgctctaaaaagacaaatgaatggggaaagacaatcattgaatacaaaacaaataagccatcacgcctgcccttccttgatattgcacctttggacatcggtggtgctgaccatgaattctttgtggacattggcccagtctgtttcaaataaatgaactcaatctaaattaaaaaagaaagaaatttgaaaaaactttctctttgccatttcttcttcttcttttttaactgaaagctgaatccttccatttcttctgcacatctacttgcttaaattgtgggcaaaagagaaaaagaaggattgatcagagcattgtgcaatacagtttcattaactccttcccccgctcccccaaaaatttgaatttttttttcaacactcttacacctgttatggaaaatgtcaacctttgtaagaaaaccaaaataaaaattgaaaaataaaaaccataaacatttgcaccacttgtggcttttgaatatcttccacagagggaagtttaaaacccaaacttccaaaggtttaaactacctcaaaacactttcccatgagtgtgatccacattgttaggtgctgacctagacagagatgaactgaggtccttgttttgttttgttcataatacaaaggtgctaattaatagtatttcagatacttgaagaatgttgatggtgctagaagaatttgagaagaaatactcctgtattgagttgtatcgtgtggtgtattttttaaaaaatttgatttagcattcatattttccatcttattcccaattaaaagtatgcagattatttgcccaaagttgtcctcttcttcagattcagcatttgttctttgccagtctcattttcatcttcttccatggttccacagaagctttgtttcttgggcaagcagaaaaattaaattgtacctattttgtatatgtgagatgtttaaataaattgtgaaaaaaatgaaataaagcatgtttggttttccaaaagaacatat

SEQ ID NO: 29 - DNA, 595 bp, Homo sapiens
gggcaaggctgggccgggaagggcgtgggttgaggagaggctccagacccgcacgccgcgcgcacagagctctcagcgccgctcccagccacagcctcccgcgcctcgctcagctccaacatggcaaaaatctccagccctacagagactgagcggtgcatcgagtccctgattgctgtcttccagaagtatgctggaaaggatggttataactacactctctccaagacagagttcctaagcttcatgaatacagaactagctgccttcacaaagaaccagaaggaccctggtgtccttgaccgcatgatgaagaaactggacaccaacagtgatggtcagctagatttctcagaatttcttaatctgattggtggcctagctatggcttgccatgactccttcctcaaggctgtcccttcccagaagcggacctgaggaccccttggccctggccttcaaacccaccccctttccttccagcctttctgtcatcatctccacagcccacccatcccctgagcacactaaccacctcatgcaggccccacctgccaatagtaataaagcaatgtcacttttttaaaacatgaaa

SEQ ID NO: 30 - DNA, 2116 bp, Homo sapiens
gtgaaggccggcgcgctcgccggccgaggtgggatcccgaggcctctccagtccgccgagggcgcaccaccggcccgtctcgcccgccgcgccggggaggtggagcacgagcgcacgtgttaggacccgaaagatggtgaactatgcctgggcagggcgaagccagaggaaactctggtggaggtccgtagcggtcctgacgtgcaaatcggtcgtccgacctgggtataggggcgggctccaggcgaggcggtcgacgctcctgaaaacttgcgcgcgcgctcgcgccactgcgcccggagcgatgaagatggtcgcgccctggacgcggttctactccaacagctgctgcttgtgctgccatgtccgcaccggcaccatcctgctcggcgtctggtatctgatcatcaatgctgtggtactgttgattttattgagtgccctggctgatccggatcagtataacttttcaagttctgaactgggaggtgactttgagttcatggatgatgccaacatgtgcattgccattgcgatttctcttctcatgatcctgatatgtgctatggctacttacggagcgtacaagcaacgcgcagcctggatcatcccattcttctgttaccagatctttgactttgccctgaacatgttggttgcaatcactgtgcttatttatccaaactccattcaggaatacatacggcaactgcctcctaattttccctacagagatgatgtcatgtcagtgaatcctacctgtttggtccttattattcttctgtttattagcattatcttgacttttaagggttacttgattagctgtgtttggaactgctaccgatacatcaatggtaggaactcctctgatgtcctggtttatgttaccagcaatgacactacggtgctgctacccccgtatgatgatgccactgtgaatggtgctgccaaggagccaccgccaccttacgtgtctgcctaagccttcaagtgggcggagctgagggcagcagcttgactttgcagacatctgagcaatagttctgttatttcacttttgccatgagcctctctgagcttgtttgttgctgaaatgctactttttaaaatttagatgttagattgaaaactgtagttttcaacatatgctttgctagaacactgtgatagattaactgtagaattcttcctgtacgattggggatataatgggcttcactaaccttccctaggcattgaaacttcccccaaatctgatggacctagaagtctgcttttgtacctgctgggccccaaagttgggcatttttctctctgttccctctcttttgaaaatgtaaaataaaaccaaaaatagacaactttttcttcagccattccagcatagagaacaaaaccttatggaaacaggaatgtcaattgtgtaatcattgttctaattaggtaaatagaagtccttatgtatgtgttacaagaatttcccccacaacatcctttatgactgaagttcaatgacagtttgtgtttgggtggtaaaggattttctccatggcctgaattaagaccattagaaagcaccaggccgtgggagcagtgaccatctgctgactgttcttgtggatcttgtgtccagggacatggggtgacatgcctcgtatgtgttagagggtggaatggatgtgtttggcgctgcatgggatctggtgcccctcttctcctggattcacatccccacccagggcccgcttttactaagtgttctgccctagattggttcaaggaggtcatccaactgactttatcaagtggaattgggatatatttgatatacttctgcctaacaacatggaaaagggttttcttttccctgcaagctacatcctactgctttgaacttccaagtatgtctagtcaccttttaaaatgtaaacattttcagaaaaatgaggattgccttccttgtatgcgctttttaccttgactacctgaattgcaagggatttttatatattcatatgttacaaagtcagcaactctcctgttggttcattattgaatgtgctgtaaattaagttgtttgcaattaaaacaaggtttgcccacaaaaaaaaaa

SEQ ID NO: 31 - DNA, 3583 bp, Homo sapiens
cgcggacccggccggcccaggcccgcgcccgccgcggccctgagaggccccggcaggtcccggcccggcggcggcagccatggccggggggccgggcccgggggagcccgcagcccccggcgcccagcacttcttgtacgaggtgccgccctgggtcatgtgccgcttctacaaagtgatggacgccctggagcccgccgactggtgccagttcgccgccctgatcgtgcgcgaccagaccgagctgcggctgtgcgagcgctccgggcagcgcacggccagcgtcctgtggccctggatcaaccgcaacgcccgtgtggccgacctcgtgcacatcctcacgcacctgcagctgctccgtgcgcgggacatcatcacagcctggcaccctcccgccccgcttccgtccccaggcaccactgccccgaggcccagcagcatccctgcacccgccgaggccgaggcctggagcccccggaagttgccatcctcagcctccaccttcctctccccagcttttccaggctcccagacccattcagggcctgagctcggcctggttccaagccctgcttccctgtggcctccaccgccatctccagccccttcttctaccaagccaggcccagagagctcagtgtccctcctgcagggagcccgcccctctccgttttgctggcccctctgtgagatttcccggggcacccacaacttctcggaggagctcaagatcggggagggtggctttgggtgcgtgtaccgggcggtgatgaggaacacggtgtatgctgtgaagaggctgaaggagaacgctgacctggagtggactgcagtgaagcagagcttcctgaccgaggtggagcagctgtccaggtttcgtcacccaaacattgtggactttgctggctactgtgctcagaacggcttctactgcctggtgtacggcttcctgcccaacggctccctggaggaccgtctccactgccagacccaggcctgcccacctctctcctggcctcagcgactggacatccttctgggtacagcccgggcaattcagtttctacatcaggacagccccagcctcatccatggagacatcaagagttccaacgtccttctggatgagaggctgacacccaagctgggagactttggcctggcccggttcagccgctttgccgggtccagccccagccagagcagcatggtggcccggacacagacagtgcggggcaccctggcctacctgcccgaggagtacatcaagacgggaaggctggctgtggacacggacaccttcagctttggggtggtagtgctagagaccttggctggtcagagggctgtgaagacgcacggtgccaggaccaagtatctgaaagacctggtggaagaggaggctgaggaggctggagtggctttgagaagcacccagagcacactgcaagcaggtctggctgcagatgcctgggctgctcccatcgccatgcagatctacaagaagcacctggaccccaggcccgggccctgcccacctgagctgggcctgggcctgggccagctggcctgctgctgcctgcaccgccgggccaaaaggaggcctcctatgacccaggtgtacgagaggctagagaagctgcaggcagtggtggcgggggtgcccgggcatttggaggccgccagctgcatccccccttccccgcaggagaactcctacgtgtccagcactggcagagcccacagtggggctgctccatggcagcccctggcagcgccatcaggagccagtgcccaggcagcagagcagctgcagagaggccccaaccagcccgtggagagtgacgagagcctaggcggcctctctgctgccctgcgctcctggcacttgactccaagctgccctctggacccagcacccctcagggaggccggctgtcctcagggggacacggcaggagaatcgagctgggggagtggcccaggatcccggcccacagccgtggaaggactggcccttggcagctctgcatcatcgtcgtcagagccaccgcagattatcatcaaccctgcccgacagaagatggtccagaagctggccctgtacgaggatggggccctggacagcctgcagctgctgtcgtccagctccctcccaggcttgggcctggaacaggacaggcaggggcccgaagaaagtgatgaatttcagagctgatgtgttcacctgggcagatcccccaaatccggaagtcaaagttctcatggtcagaagttctcatggtgcacgagtcctcagcactctgccggcagtgggggtgggggcccatgcccgcgggggagagaaggaggtggccctgctgttctaggctctgtgggcataggcaggcagagtggaaccctgcctccatgccagcatctgggggcaaggaaggctggcatcatccagtgaggaggctggcgcatgttgggaggctgctggctgcacagacccgtgaggggaggagaggggctgctgtgcaggggtgtggagtagggagctggctcccctgagagccatgcagggcgtctgcagcccaggcctctggcagcagctctttgcccatctctttggacagtggccaccctgcacaatggggccgacgaggcctagggccctcctacctgcttacaatttggaaaagtgtggccgggtgcggtggctcacgcctgtaatcccagcactttgggaggccaaggcaggaggatcgctggagcccagtaggtcaagaccagccagggcaacatgatgagaccctgtctctgccaaaaaattttttaaactattagcctggcgtggtagcgcacgcctgtggtcccagctgctggggaggctgaagtaggaggatcatttatgcttgggaggtcgaggctgcagtgagtcatgattgtatgactgcactccagcctgggtgacagagcaagaccctgtttcaaaaagaaaaaccctgggaaaagtgaagtatggctgtaagtctcatggttcagtcctagcaagaagcgagaattctgagatcctccagaaagtcgagcagcacccacctccaacctcgggccagtgtcttcaggctttactggggacctgcgagctggcctaatgtggtggcctgcaagccaggccatccctgggcgccacagacgagctccgagccaggtcaggcttcggaggccacaagctcagcctcaggcccaggcactgattgtggcagaggggccactacccaaggtctagctaggcccaagacctagttacccagacagtgagaagcccctggaaggcagaaaagttgggagcatggcagacagggaagggaaacattttcagggaaaagacatgtatcacatgtcttcagaagcaagtcaggtttcatgtaaccgagtgtcctcttgcgtgtccaaaagtagcccagggctgtagcacaggcttcacagtgattttgtgttcagccgtgagtcacactacatgcccccgtgaagctgggcattggtgacgtccaggttgtccttgagtaataaaaacgtatgttccctaaaaaaaaaaaaa

SEQ ID NO: 32 - DNA, 905 bp, Homo sapiens
caacacaggggcagtctccaggacctccacaccattaacaagatgagccttgtgctcccttgggctctagagaggaagcccctctgagccctcagcccctctttcctccctctcctaaagtaatttgatcctcaggaatttgttctgccctcatctggccctggccagctctgcatttgacaaatgccaggaagaggaaactgttgagaaaacggaactactggggaaagggagggctcactgagaaccatcccggtaacccgaccgccgctggtcaccatgaaccacattgtgcaaaccttctctcctgtcaacagcggccagcctcccaactacgagatgctcaaggaggagcaggaagtggctatgctgggggggccccacaaccctgctcccccgacgtccaccgtgatccacatccgcagcgagacctccgtgcctgaccatgtcgtctggtccctgttcaacaccctcttcatgaacacctgctgcctgggcttcatagcattcgcctactccgtgaagtctagggacaggaagatggttggcgacgtgaccggggcccaggcctatgcctccaccgccaagtgcctgaacatctgggccctgattttgggcatcttcatgaccattctgctcgtcatcatcccagtgttggtcgtccaggcccagcgatagatcaggaggcatcattgaggccaggagctctgcccgtgacctgtatcccacgtactctatcttccattcctcgccctgcccccagaggccaggagctctgcccttgacctgtattccacttactccaccttccattcctcgccctgtccccacagccgagtcctgcatcagccctttatcctcacacgcttttctacaatggcattcaataaagtgtatatgtttct

SEQ ID NO: 33 - DNA, 782 bp, Homo sapiens
aggggccttagcgtgccgcatcgccgagatccagcgcccagagagacaccagagaacccaccatggccccctttgagcccctggcttctggcatcctgttgttgctgtggctgatagcccccagcagggcctgcacctgtgtcccaccccacccacagacggccttctgcaattccgacctcgtcatcagggccaagttcgtggggacaccagaagtcaaccagaccaccttataccagcgttatgagatcaagatgaccaagatgtataaagggttccaagccttaggggatgccgctgacatccggttcgtctacacccccgccatggagagtgtctgcggatacttccacaggtcccacaaccgcagcgaggagtttctcattgctggaaaactgcaggatggactcttgcacatcactacctgcagtttcgtggctccctggaacagcctgagcttagctcagcgccggggcttcaccaagacctacactgttggctgtgaggaatgcacagtgtttccctgtttatccatcccctgcaaactgcagagtggcactcattgcttgtggacggaccagctcctccaaggctctgaaaagggcttccagtcccgtcaccttgcctgcctgcctcgggagccagggctgtgcacctggcagtccctgcggtcccagatagcctgaatcctgcccggagtggaactgaagcctgcacagtgtccaccctgttcccactcccatctttcttccggacaatgaaataaagagttaccacccagc

SEQ ID NO: 34 - DNA, 1124 bp, Homo sapiens
gccgctgccaccgcaccccgccatggagcggccgtcgctgcgcgccctgctcctcggcgccgctgggctgctgctcctgctcctgcccctctcctcttcctcctcttcggacacctgcggcccctgcgagccggcctcctgcccgcccctgcccccgctgggctgcctgctgggcgagacccgcgacgcgtgcggctgctgccctatgtgcgcccgcggcgagggcgagccgtgcgggggtggcggcgccggcagggggtactgcgcgccgggcatggagtgcgtgaagagccgcaagaggcggaagggtaaagccggggcagcagccggcggtccgggtgtaagcggcgtgtgcgtgtgcaagagccgctacccggtgtgcggcagcgacggcaccacctacccgagcggctgccagctgcgcgccgccagccagagggccgagagccgcggggagaaggccatcacccaggtcagcaagggcacctgcgagcaaggtccttccatagtgacgccccccaaggacatctggaatgtcactggtgcccaggtgtacttgagctgtgaggtcatcggaatcccgacacctgtcctcatctggaacaaggtaaaaaggggtcactatggagttcaaaggacagaactcctgcctggtgaccgggacaacctggccattcagacccggggtggcccagaaaagcatgaagtaactggctgggtgctggtatctcctctaagtaaggaagatgctggagaatatgagtgccatgcatccaattcccaaggacaggcttcagcatcagcaaaaattacagtggttgatgccttacatgaaataccagtgaaaaaaggtgaaggtgccgagctataaacctccagaatattattagtctgcatggttaaaagtagtcatggataactacattacctgttcttgcctaataagtttcttttaatccaatccactaacactttagttatattcactggttttacacagagaaatacaaaataaagatcacacatcaagactatctacaaaaatttattatatatttacagaagaaaagcatgcatatcattaaacaaataaaatactttttatcacaaaaaaaaaaaaaaaa

SEQ ID NO: 35 - DNA, 647 bp, Homo sapiens
gctcactgagcaccgtcccagcatccggacaccacagcggcccttcgctccacgcagaaaaccacacttctcataccttcactcaacacttccttccccaaagccagaagatgcacaaggaggaacatgaggtggctgtgctgggggcaccccccagcaccatccttccaaggtccaccgtgattaacatccacagcgagacctccgtgcccgaccatgtcgtctggtccctgttcaacaccctcttcttgaactggtgctgtctgggcttcatagcattcgcctactccgtaaagtctagggacaggaagatggttggcgacgtgaccggggcccaggcctatgcctccaccgccaagtgcctgaacatctgggccctgattctgggcatcctcatgaccattggattcatcctgttactggtattcggctctgtaacagtctaccatattatgttacagataatacaggaaaaacggggttactagtagccgcccatagcctgcaacctttgcactccactgtgcaatgctggccctgcacgctggggctgttgcccctgcccccttggtcctgcccctagatacagcagtttatacccacacacctgtctacagtgtcattcaataaagtgcacgtgcttgtga

SEQ ID NO: 36 - DNA, 5489 bp, Homo sapiens
ggctgagttttatgacgggcccggtgctgaagggcagggaacaacttgatggtgctactttgaactgcttttcttttctcctttttgcacaaagagtctcatgtctgatatttagacatgatgagctttgtgcaaaaggggagctggctacttctcgctctgcttcatcccactattattttggcacaacaggaagctgttgaaggaggatgttcccatcttggtcagtcctatgcggatagagatgtctggaagccagaaccatgccaaatatgtgtctgtgactcaggatccgttctctgcgatgacataatatgtgacgatcaagaattagactgccccaacccagaaattccatttggagaatgttgtgcagtttgcccacagcctccaactgctcctactcgccctcctaatggtcaaggacctcaaggccccaagggagatccaggccctcctggtattcctgggagaaatggtgaccctggtattccaggacaaccagggtcccctggttctcctggcccccctggaatctgtgaatcatgccctactggtcctcagaactattctccccagtatgattcatatgatgtcaagtctggagtagcagtaggaggactcgcaggctatcctggaccagctggccccccaggccctcccggtccccctggtacatctggtcatcctggttcccctggatctccaggataccaaggaccccctggtgaacctgggcaagctggtccttcaggccctccaggacctcctggtgctataggtccatctggtcctgctggaaaagatggagaatcaggtagacccggacgacctggagagcgaggattgcctggacctccaggtatcaaaggtccagctgggatacctggattccctggtatgaaaggacacagaggcttcgatggacgaaatggagaaaagggtgaaacaggtgctcctggattaaagggtgaaaatggtcttccaggcgaaaatggagctcctggacccatgggtccaagaggggctcctggtgagcgaggacggccaggacttcctggggctgcaggtgctcggggtaatgacggtgctcgaggcagtgatggtcaaccaggccctcctggtcctcctggaactgccggattccctggatcccctggtgctaagggtgaagttggacctgcagggtctcctggttcaaatggtgcccctggacaaagaggagaacctggacctcagggacacgctggtgctcaaggtcctcctggccctcctgggattaatggtagtcctggtggtaaaggcgaaatgggtcccgctggcattcctggagctcctggactgatgggagcccggggtcctccaggaccagccggtgctaatggtgctcctggactgcgaggtggtgcaggtgagcctggtaagaatggtgccaaaggagagcccggaccacgtggtgaacgcggtgaggctggtattccaggtgttccaggagctaaaggcgaagatggcaaggatggatcacctggagaacctggtgcaaatgggcttccaggagctgcaggagaaaggggtgcccctgggttccgaggacctgctggaccaaatggcatcccaggagaaaagggtcctgctggagagcgtggtgctccaggccctgcagggcccagaggagctgctggagaacctggcagagatggcgtccctggaggtccaggaatgaggggcatgcccggaagtccaggaggaccaggaagtgatgggaaaccagggcctcccggaagtcaaggagaaagtggtcgaccaggtcctcctgggccatctggtccccgaggtcagcctggtgtcatgggcttccccggtcctaaaggaaatgatggtgctcctggtaagaatggagaacgaggtggccctggaggacctggccctcagggtcctcctggaaagaatggtgaaactggacctcaaggacccccagggcctactgggcctggtggtgacaaaggagacacaggaccccctggtccacaaggattacaaggcttgcctggtacaggtggtcctccaggagaaaatggaaaacctggggaaccaggtccaaagggtgatgccggtgcacctggagctccaggaggcaagggtgatgctggtgcccctggtgaacgtggacctcctggattggcaggggccccaggacttagaggtggagctggtccccctggtcccgaaggaggaaagggtgctgctggtcctcctgggccacctggtgctgctggtactcctggtctgcaaggaatgcctggagaaagaggaggtcttggaagtcctggtccaaagggtgacaagggtgaaccaggcggcccaggtgctgatggtgtcccagggaaagatggcccaaggggtcctactggtcctattggtcctcctggcccagctggccagcctggagataagggtgaaggtggtgcccccggacttccaggtatagctggacctcgtggtagccctggtgagagaggtgaaactggccctccaggacctgctggtttccctggtgctcctggacagaatggtgaacctggtggtaaaggagaaagaggggctccgggtgagaaaggtgaaggaggccctcctggagttgcaggaccccctggaggttctggacctgctggtcctcctggtccccaaggtgtcaaaggtgaacgtggcagtcctggtggacctggtgctgctggcttccctggtgctcgtggtcttcctggtcctcctggtagtaatggtaacccaggacccccaggtcccagcggttctccaggcaaggatgggcccccaggtcctgcgggtaacactggtgctcctggcagccctggagtgtctggaccaaaaggtgatgctggccaaccaggagagaagggatcgcctggtgcccagggcccaccaggagctccaggcccacttgggattgctgggatcactggagcacggggtcttgcaggaccaccaggcatgccaggtcctaggggaagccctggccctcagggtgtcaagggtgaaagtgggaaaccaggagctaacggtctcagtggagaacgtggtccccctggaccccagggtcttcctggtctggctggtacagctggtgaacctggaagagatggaaaccctggatcagatggtcttccaggccgagatggatctcctggtggcaagggtgatcgtggtgaaaatggctctcctggtgcccctggcgctcctggtcatccaggcccacctggtcctgtcggtccagctggaaagagtggtgacagaggagaaagtggccctgctggccctgctggtgctcccggtcctgctggttcccgaggtgctcctggtcctcaaggcccacgtggtgacaaaggtgaaacaggtgaacgtggagctgctggcatcaaaggacatcgaggattccctggtaatccaggtgccccaggttctccaggccctgctggtcagcagggtgcaatcggcagtccaggacctgcaggccccagaggacctgttggacccagtggacctcctggcaaagatggaaccagtggacatccaggtcccattggaccaccagggcctcgaggtaacagaggtgaaagaggatctgagggctccccaggccacccagggcaaccaggccctcctggacctcctggtgcccctggtccttgctgtggtggtgttggagccgctgccattgctgggattggaggtgaaaaagctggcggttttgccccgtattatggagatgaaccaatggatttcaaaatcaacaccgatgagattatgacttcactcaagtctgttaatggacaaatagaaagcctcattagtcctgatggttctcgtaaaaaccccgctagaaactgcagagacctgaaattctgccatcctgaactcaagagtggagaatactgggttgaccctaaccaaggatgcaaattggatgctatcaaggtattctgtaatatggaaactggggaaacatgcataagtgccaatcctttgaatgttccacggaaacactggtggacagattctagtgctgagaagaaacacgtttggtttggagagtccatggatggtggttttcagtttagctacggcaatcctgaacttcctgaagatgtccttgatgtgcagctggcattccttcgacttctctccagccgagcttcccagaacatcacatatcactgcaaaaatagcattgcatacatggatcaggccagtggaaatgtaaagaaggccctgaagctgatggggtcaaatgaaggtgaattcaaggctgaaggaaatagcaaattcacctacacagttctggaggatggttgcacgaaacacactggggaatggagcaaaacagtctttgaatatcgaacacgcaaggctgtgagactacctattgtagatattgcaccctatgacattggtggtcctgatcaagaatttggtgtggacgttggccctgtttgctttttataaaccaaactctatctgaaatcccaacaaaaaaaatttaactccatatgtgttcctcttgttctaatcttgtcaaccagtgcaagtgaccgacaaaattccagttatttatttccaaaatgtttggaaacagtataatttgacaaagaaaaatgatacttctctttttttgctgttccaccaaatacaattcaaatgctttttgttttatttttttaccaattccaatttcaaaatgtctcaatggtgctataataaataaacttcaacactctttatgataacaacactgtgttatattctttgaatcctagcccatctgcagagcaatgactgtgctcaccagtaaaagataacctttctttctgaaatagtcaaatacgaaattagaaaagccctccctattttaactacctcaactggtcagaaacacagattgtattctatgagtcccagaagatgaaaaaaattttatacgttgataaaacttataaatttcattgattaatctcctggaagattggtttaaaaagaaaagtgtaatgcaagaatttaaagaaatatttttaaagccacaattattttaatattggatatcaactgcttgtaaaggtgctcctcttttttcttgtcattgctggtcaagattactaatatttgggaaggctttaaagacgcatgttatggtgctaatgtactttcacttttaaactctagatcagaattgttgacttgcattcagaacataaatgcacaaaatctgtacatgtctcccatcagaaagattcattggcatgccacagggattctcctccttcatcctgtaaaggtcaacaataaaaaccaaattatggggctgcttttgtcacactagcatagagaatgtgttgaaatttaactttgtaagcttgtatgtggttgttgatcttttttttccttacagacacccataataaaatatcatattaaaattc

SEQ ID NO: 37 - DNA, 1722 bp, Homo sapiens
ggggaaaagagctaggaaagagctgcaaagcagtgtgggctttttccctttttttgctccttttcattacccctcctccgttttcacccttctccggacttcgcgtagaacctgcgaatttcgaagaggaggtggcaaagtgggagaaaagaggtgttagggtttggggtttttttgtttttgtttttgttttttaatttcttgatttcaacattttctcccaccctctcggctgcagccaacgcctcttacctgttctgcggcgccgcgcaccgctggcagctgagggttagaaagcggggtgtattttagattttaagcaaaaattttaaagataaatccatttttctctcccacccccaacgccatctccactgcatccgatctcattatttcggtggttgcttgggggtgaacaattttgtggctttttttcccctataattctgacccgctcaggcttgagggtttctccggcctccgctcactgcgtgcacctggcgctgccctgcttcccccaacctgttgcaaggctttaattcttgcaactgggacctgctcgcaggcaccccagccctccacctctctctacatttttgcaagtgtctgggggagggcacctgctctacctgccagaaattttaaaacaaaaacaaaaacaaaaaaatctccgggggccctcttggcccctttatccctgcactctcgctctcctgccccaccccgaggtaaagggggcgactaagagaagatggtgttgctcaccgcggtcctcctgctgctggccgcctatgcggggccggcccagagcctgggctccttcgtgcactgcgagccctgcgacgagaaagccctctccatgtgcccccccagccccctgggctgcgagctggtcaaggagccgggctgcggctgctgcatgacctgcgccctggccgaggggcagtcgtgcggcgtctacaccgagcgctgcgcccaggggctgcgctgcctcccccggcaggacgaggagaagccgctgcacgccctgctgcacggccgcggggtttgcctcaacgaaaagagctaccgcgagcaagtcaagatcgagagagactcccgtgagcacgaggagcccaccacctctgagatggccgaggagacctactcccccaagatcttccggcccaaacacacccgcatctccgagctgaaggctgaagcagtgaagaaggaccgcagaaagaagctgacccagtccaagtttgtcgggggagccgagaacactgcccacccccggatcatctctgcacctgagatgagacaggagtctgagcagggcccctgccgcagacacatggaggcttccctgcaggagctcaaagccagcccacgcatggtgccccgtgctgtgtacctgcccaattgtgaccgcaaaggattctacaagagaaagcagtgcaaaccttcccgtggccgcaagcgtggcatctgctggtgcgtggacaagtacgggatgaagctgccaggcatggagtacgttgacggggactttcagtgccacaccttcgacagcagcaacgttgagtgatgcgtccccccccaacctttccctcaccccctcccacccccagccccgactccagccagcgcctccctccaccccaggacgccactcatttcatctcatttaagggaaaaatatatatctatctatttgaggaaaaaaaaaaaaaaaaaaaa

SEQ ID NO: 38 - DNA, 1200 bp, Homo sapiens
aagatataaaagctccagaaacgttgactgggaccactggagacactgaagaaggcaggggcccttagagtcttggttgccaaacagatttgcagatcaaggagaacccaggagtttcaaagaagcgctagtaaggtctctgagatccttgcactagctacatcctcagggtaggaggaagatggcttccagaagcatgcggctgctcctattgctgagctgcctggccaaaacaggagtcctgggtgatatcatcatgagacccagctgtgctcctggatggttttaccacaagtccaattgctatggttacttcaggaagctgaggaactggtctgatgccgagctcgagtgtcagtcttacggaaacggagcccacctggcatctatcctgagtttaaaggaagccagcaccatagcagagtacataagtggctatcagagaagccagccgatatggattggcctgcacgacccacagaagaggcagcagtggcagtggattgatggggccatgtatctgtacagatcctggtctggcaagtccatgggtgggaacaagcactgtgctgagatgagctccaataacaactttttaacttggagcagcaacgaatgcaacaagcgccaacacttcctgtgcaagtaccgaccatagagcaagaatcaagattctgctaactcctgcacagccccgtcctcttcctttctgctagcctggctaaatctgctcattatttcagaggggaaacctagcaaactaagagtgataagggccctactacactggcttttttaggcttagagacagaaactttagcattggcccagtagtggcttctagctctaaatgtttgccccgccatccctttccacagtatccttcttccctcctcccctgtctctggctgtctcgagcagtctagaagagtgcatctccagcctatgaaacagctgggtctttggccataagaagtaaagatttgaagacagaaggaagaaactcaggagtaagcttctagaccccttcagcttctacacccttctgccctctctccattgcctgcaccccaccccagccactcaactcctgcttgtttttcctttggccataggaaggtttaccagtagaatccttgctaggttgatgtgggccatacattcctttaataaaccattgtgtacataagaaaaaaaaaa

SEQ ID NO: 39 - DNA, 1701 bp, Homo sapiens
ccgcatcctagccgccgactcacacaaggcaggtgggtgaggaaatccagagttgccatggagaaaattccagtgtcagcattcttgctccttgtggccctctcctacactctggccagagataccacagtcaaacctggagccaaaaaggacacaaaggactctcgacccaaactgccccagaccctctccagaggttggggtgaccaactcatctggactcagacatatgaagaagctctatataaatccaagacaagcaacaaacccttgatgattattcatcacttggatgagtgcccacacagtcaagctttaaagaaagtgtttgctgaaaataaagaaatccagaaattggcagagcagtttgtcctcctcaatctggtttatgaaacaactgacaaacacctttctcctgatggccagtatgtccccaggattatgtttgttgacccatctctgacagttagagccgatatcactggaagatattcaaatcgtctctatgcttacgaacctgcagatacagctctgttgcttgacaacatgaagaaagctctcaagttgctgaagactgaattgtaaagaaaaaaaatctccaagcccttctgtctgtcaggccttgagacttgaaaccagaagaagtgtgagaagactggctagtgtggaagcatagtgaacacactgattaggttatggtttaatgttacaacaactattttttaagaaaaacaagttttagaaatttggtttcaagtgtacatgtgtgaaaacaatattgtatactaccatagtgagccatgattttctaaaaaaaaaaataaatgttttgggggtgttctgttttctccaacttggtctttcacagtggttcgtttaccaaataggattaaacacacacaaaatgctcaaggaagggacaagacaaaaccaaaactagttcaaatgatgaagaccaaagaccaagttatcatctcaccacaccacaggttctcactagatgactgtaagtagacacgagcttaatcaacagaagtatcaagccatgtgctttagcataaaagaatatttagaaaaacatcccaagaaaatcacatcactacctagagtcaactctggccaggaactctaaggtacacactttcatttagtaattaaattttagtcagattttgcccaacctaatgctctcagggaaagcctctggcaagtagctttctccttcagaggtctaatttagtagaaaggtcatccaaagaacatctgcactcctgaacacaccctgaagaaatcctgggaattgaccttgtaatcgatttgtctgtcaaggtcctaaagtactggagtgaaataaattcagccaacatgtgactaattggaagaagagcaaagggtggtgacgtgttgatgaggcagatggagatcagaggttactagggtttaggaaacgtgaaaggctgtggcatcagggtaggggagcattctgcctaacagaaattagaattgtgtgttaatgtcttcactctatacttaatctcacattcattaatatatggaattcctctactgcccagcccctcctgatttctttggcccctggactatggtgctgtatataatgctttgcagtatctgttgcttgtcttgattaacttttttggataaaaccttttttgaacagaaaaaaaaaaaaaaaaaaaa

SEQ ID NO: 40 - DNA, 2259 bp, Homo sapiens
cagttgcttcagcgtcccggtgtggctgtgccgttggtcctgtgcggtcacttagccaagatgcctgaggaaacccagacccaagaccaaccgatggaggaggaggaggttgagacgttcgcctttcaggcagaaattgcccagttgatgtcattgatcatcaatactttctactcgaacaaagagatctttctgagagagctcatttcaaattcatcagatgcattggacaaaatccggtatgaaagcttgacagatcccagtaaattagactctgggaaagagctgcatattaaccttataccgaacaaacaagatcgaactctcactattgtggatactggaattggaatgaccaaggctgacttgatcaataaccttggtactatcgccaagtctgggaccaaagcgttcatggaagctttgcaggctggtgcagatatctctatgattggccagttcggtgttggtttttattctgcttatttggttgctgagaaagtaactgtgatcaccaaacataacgatgatgagcagtacgcttgggagtcctcagcagggggatcattcacagtgaggacagacacaggtgaacctatgggtcgtggaacaaaagttatcctacacctgaaagaagaccaaactgagtacttggaggaacgaagaataaaggagattgtgaagaaacattctcagtttattggatatcccattactctttttgtggagaaggaacgtgataaagaagtaagcgatgatgaggctgaagaaaaggaagacaaagaagaagaaaaagaaaaagaagagaaagagtcggaagacaaacctgaaattgaagatgttggttctgatgaggaagaagaaaagaaggatggtgacaagaagaagaagaagaagattaaggaaaagtacatcgatcaagaagagctcaacaaaacaaagcccatctggaccagaaatcccgacgatattactaatgaggagtacggagaattctataagagcttgaccaatgactgggaagatcacttggcagtgaagcatttttcagttgaaggacagttggaattcagagcccttctatttgtcccacgacgtgctccttttgatctgtttgaaaacagaaagaaaaagaacaacatcaaattgtatgtacgcagagttttcatcatggataactgtgaggagctaatccctgaatatctgaacttcattagaggggtggtagactcggaggatctccctctaaacatatcccgtgagatgttgcaacaaagcaaaattttgaaagttatcaggaagaatttggtcaaaaaatgcttagaactctttactgaactggcggaagataaagagaactacaagaaattctatgagcagttctctaaaaacataaagcttggaatacacgaagactctcaaaatcggaagaagctttcagagctgttaaggtactacacatctgcctctggtgatgagatggtttctctcaaggactactgcaccagaatgaaggagaaccagaaacatatctattatatcacaggtgagaccaaggaccaggtagctaactcagcctttgtggaacgtcttcggaaacatggcttagaagtgatctatatgattgagcccattgatgagtactgtgtccaacagctgaaggaatttgaggggaagactttagtgtcagtcaccaaagaaggcctggaacttccagaggatgaagaagagaaaaagaagcaggaagagaaaaaaacaaagtttgagaacctctgcaaaatcatgaaagacatattggagaaaaaagttgaaaaggtggttgtgtcaaaccgattggtgacatctccatgctgtattgtcacaagcacatatggctggacagcaaacatggagagaatcatgaaagctcaagccctaagagacaactcaacaatgggttacatggcagcaaagaaacacctggagataaaccctgaccattccattattgagaccttaaggcaaaaggcagaggctgataagaacgacaagtctgtgaaggatctggtcatcttgctttatgaaactgcgctcctgtcttctggcttcagtctggaagatccccagacacatgctaacaggatctacaggatgatcaaacttggtctgggtattgatgaagatgaccctactgctgatgataccagtgctgctgtaactgaagaaatgccaccccttgaaggagatgacgacacatcacgcatggaagaagtagactaa

SEQ ID NO: 41 - DNA, 7080 bp, Homo sapiens
gagctagcgctcaagcagagcccagcgcggtgctatcggacagagcctggcgagcgcaagcggcgcggggagccagcggggctgagcgcggccagggtctgaacccagatttcccagactagctaccactccgcttgcccacgccccgggagctcgcggcgcctggcggtcagcgaccagacgtccggggccgctgcgctcctggcccgcgaggcgtgacactgtctcggctacagacccagagggagcacactgccaggatgggagctgctgggaggcaggacttcctcttcaaggccatgctgaccatcagctggctcactctgacctgcttccctggggccacatccacagtggctgctgggtgccctgaccagagccctgagttgcaaccctggaaccctggccatgaccaagaccaccatgtgcatatcggccagggcaagacactgctgctcacctcttctgccacggtctattccatccacatctcagagggaggcaagctggtcattaaagaccacgacgagccgattgttttgcgaacccggcacatcctgattgacaacggaggagagctgcatgctgggagtgccctctgccctttccagggcaatttcaccatcattttgtatggaagggctgatgaaggtattcagccggatccttactatggtctgaagtacattggggttggtaaaggaggcgctcttgagttgcatggacagaaaaagctctcctggacatttctgaacaagacccttcacccaggtggcatggcagaaggaggctatttttttgaaaggagctggggccaccgtggagttattgttcatgtcatcgaccccaaatcaggcacagtcatccattctgaccggtttgacacctatagatccaagaaagagagtgaacgtctggtccagtatttgaacgcggtgcccgatggcaggatcctttctgttgcagtgaatgatgaaggttctcgaaatctggatgacatggccaggaaggcgatgaccaaattgggaagcaaacacttcctgcaccttggatttagacacccttggagttttctaactgtgaaaggaaatccatcatcttcagtggaagaccatattgaatatcatggacatcgaggctctgctgctgcccgggtattcaaattgttccagacagagcatggcgaatatttcaatgtttctttgtccagtgagtgggttcaagacgtggagtggacggagtggttcgatcatgataaagtatctcagactaaaggtggggagaaaatttcagacctctggaaagctcacccaggaaaaatatgcaatcgtcccattgatatacaggccactacaatggatggagttaacctcagcaccgaggttgtctacaaaaaaggccaggattataggtttgcttgctacgaccggggcagagcctgccggagctaccgtgtacggttcctctgtgggaagcctgtgaggcccaaactcacagtcaccattgacaccaatgtgaacagcaccattctgaacttggaggataatgtacagtcatggaaacctggagataccctggtcattgccagtactgattactccatgtaccaggcagaagagttccaggtgcttccctgcagatcctgcgcccccaaccaggtcaaagtggcagggaaaccaatgtacctgcacatcggggaggagatagacggcgtggacatgcgggcggaggttgggcttctgagccggaacatcatagtgatgggggagatggaggacaaatgctacccctacagaaaccacatctgcaatttctttgacttcgatacctttgggggccacatcaagtttgctctgggatttaaggcagcacacttggagggcacggagctgaagcatatgggacagcagctggtgggtcagtacccgattcacttccacctggccggtgatgtagacgaaaggggaggttatgacccacccacatacatcagggacctctccatccatcatacattctctcgctgcgtcacagtccatggctccaatggcttgttgatcaaggacgttgtgggctataactctttgggccactgcttcttcacggaagatgggccggaggaacgcaacacttttgaccactgtcttggcctccttgtcaagtctggaaccctcctcccctcggaccgtgacagcaagatgtgcaagatgatcacagaggactcctacccggggtacatccccaagcccaggcaagactgcaatgctgtgtccaccttctggatggccaatcccaacaacaacctcatcaactgtgccgctgcaggatctgaggaaactggattttggtttatttttcaccacgtaccaacgggcccctccgtgggaatgtactccccaggttattcagagcacattccactgggaaaattctataacaaccgagcacattccaactaccgggctggcatgatcatagacaacggagtcaaaaccaccgaggcctctgccaaggacaagcggccgttcctctcaatcatctctgccagatacagccctcaccaggacgccgacccgctgaagccccgggagccggccatcatcagacacttcattgcctacaagaaccaggaccacggggcctggctgcgcggcggggatgtgtggctggacagctgccggtttgctgacaatggcattggcctgaccctggccagtggtggaaccttcccgtatgacgacggctccaagcaagagataaagaacagcttgtttgttggcgagagtggcaacgtggggacggaaatgatggacaataggatctggggccctggcggcttggaccatagcggaaggaccctccctataggccagaattttccaattagaggaattcagttatatgatggccccatcaacatccaaaactgcactttccgaaagtttgtggccctggagggccggcacaccagcgccctggccttccgcctgaataatgcctggcagagctgcccccataacaacgtgaccggcattgcctttgaggacgttccgattacttccagagtgttcttcggagagcctgggccctggttcaaccagctggacatggatggggataagacatctgtgttccatgacgtcgacggctccgtgtccgagtaccctggctcctacctcacgaagaatgacaactggctggtccggcacccagactgcatcaatgttcccgactggagaggggccatttgcagtgggtgctatgcacagatgtacattcaagcctacaagaccagtaacctgcgaatgaagatcatcaagaatgacttccccagccaccctctttacctggagggggcgctcaccaggagcacccattaccagcaataccaaccggttgtcaccctgcagaagggctacaccatccactgggaccagacggcccccgccgaactcgccatctggctcatcaacttcaacaagggcgactggatccgagtggggctctgctacccgcgaggcaccacattctccatcctctcggatgttcacaatcgcctgctgaagcaaacgtccaagacgggcgtcttcgtgaggaccttgcagatggacaaagtggagcagagctaccctggcaggagccactactactgggacgaggactcagggctgttgttcctgaagctgaaagctcagaacgagagagagaagtttgctttctgctccatgaaaggctgtgagaggataaagattaaagctctgattccaaagaacgcaggcgtcagtgactgcacagccacagcttaccccaagttcaccgagagggctgtcgtagacgtgccgatgcccaagaagctctttggttctcagctgaaaacaaaggaccatttcttggaggtgaagatggagagttccaagcagcacttcttccacctctggaacgacttcgcttacattgaagtggatgggaagaagtaccccagttcggaggatggcatccaggtggtggtgattgacgggaaccaagggcgcgtggtgagccacacgagcttcaggaactccattctgcaaggcataccatggcagcttttcaactatgtggcgaccatccctgacaattccatagtgcttatggcatcaaagggaagatacgtctccagaggcccatggaccagagtgctggaaaagcttggggcagacaggggtctcaagttgaaagagcaaatggcattcgttggcttcaaaggcagcttccggcccatctgggtgacactggacactgaggatcacaaagccaaaatcttccaagttgtgcccatccctgtggtgaagaagaagaagttgtgaggacagctgccgcccggtgccacctcgtggtagactatgacggtgactcttggcagcagaccagtgggggatggctgggtcccccagcccctgccagcagctgcctgggaaggccgtgtttcagccctgatgggccaagggaaggctatcagagaccctggtgctgccacctgcccctactcaagtgtctacctggagcccctggggcggtgctggccaatgctggaaacattcactttcctgcagcctcttgggtgcttctctcctatctgtgcctcttcagtgggggtttggggaccatatcaggagacctgggttgtgctgacagcaaagatccactttggcaggagccctgacccagctaggaggtagtctggagggctggtcattcacagatccccatggtcttcagcagacaagtgagggtggtaaatgtaggagaaagagccttggccttaaggaaatctttactcctgtaagcaagagccaacctcacaggattaggagctggggtagaactggctatccttggggaagaggcaagccctgcctctggccgtgtccacctttcaggagactttgagtggcaggtttggacttggactagatgactctcaaaggcccttttagttctgagattccagaaatctgctgcatttcacatggtacctggaacccaacagttcatggatatccactgatatccatgatgctgggtgccccagcgcacacgggatggagaggtgagaactaatgcctagcttgaggggtctgcagtccagtagggcaggcagtcaggtccatgtgcactgcaatgccaggtggagaaatcacagagaggtaaaatggaggccagtgccatttcagaggggaggctcaggaaggcttcttgcttacaggaatgaaggctgggggcattttgctggggggagatgaggcagcctctggaatggctcagggattcagccctccctgccgctgcctgctgaagctggtgactacggggtcgccctttgctcacgtctctctggcccactcatgatggagaagtgtggtcagaggggagcaatgggctttgctgcttatgagcacagaggaattcagtccccaggcagccctgcctctgactccaagagggtgaagtccacagaagtgagctcctgccttagggcctcatttgctcttcatccagggaactgagcacagggggcctccaggagaccctagatgtgctcgtactccctcggcctgggatttcagagctggaaatatagaaaatatctagcccaaagccttcattttaacagatggggaaagtgagcccccaagatgggaaagaaccacacagctaagggagggcctggggagccccaccctagcccttgctgccacaccacattgcctcaacaaccggccccagagtgcccaggcactcctgaggtagcttctggaaatggggacaagtcccctcgaaggaaaggaaatgactagagtagaatgacagctagcagatctcttccctcctgctcccagcgcacacaaacccgccctccccttggtgttggcggtccctgtggccttcactttgttcactacctgtcagcccagcctgggtgcacagtagctgcaactccccattggtgctacctggctctcctgtctctgcagctctacaggtgaggcccagcagagggagtagggctcgccatgtttctggtgagccaatttggctgatcttgggtgtctgaacagctattgggtccaccccagtccctttcagctgctgcttaatgccctgctctctccctggcccaccttatagagagcccaaagagctcctgtaagagggagaactctatctgtggtttataatcttgcacgaggcaccagagtctccctgggtcttgtgatgaactacatttatcccctttcctgccccaaccacaaactctttccttcaaagagggcctgcctggctccctccacccaactgcacccatgagactcggtccaagagtccattccccaggtgggagccaactgtcagggaggtctttcccaccaaacatctttcagctgctgggaggtgaccatagggctctgcttttaaagatatggctgcttcaaaggccagagtcacaggaaggacttcttccagggagattagtggtgatggagaggagagttaaaatgacctcatgtccttcttgtccacggttttgttgagttttcactcttctaatgcaagggtctcacactgtgaaccacttaggatgtgatcactttcaggtggccaggaatgttgaatgtctttggctcagttcatttaaaaaagatatctatttgaaagttctcagagttgtacatatgtttcacagtacaggatctgtacataaaagtttctttcctaaaccattcaccaagagccaatatctaggcattttcttggtagcacaaattttcttattgcttagaaaattgtcctccttgttatttctgtttgtaagacttaagtgagttaggtctttaaggaaagcaacgctcctctgaaatgcttgtcttttttctgttgccgaaatagctggtcctttttcgggagttagatgtatagagtgtttgtatgtaaacatttcttgtaggcatcaccatgaacaaagatatattttctatttatttattatatgtgcacttcaagaagtcactgtcagagaaataaagaattgtcttaaatgtc

SEQ ID NO: 42 - DNA, 1973 bp, Homo sapiens
gggatattggagtagcaagaggctgggaagccatcacttaccttgcactgagaaagaagacaaaggccagtatgcacagctttcctccactgctgctgctgctgttctggggtgtggtgtctcacagcttcccagcgactctagaaacacaagagcaagatgtggacttagtccagaaatacctggaaaaatactacaacctgaagaatgatgggaggcaagttgaaaagcggagaaatagtggcccagtggttgaaaaattgaagcaaatgcaggaattctttgggctgaaagtgactgggaaaccagatgctgaaaccctgaaggtgatgaagcagcccagatgtggagtgcctgatgtggctcagtttgtcctcactgaggggaaccctcgctgggagcaaacacatctgacctacaggattgaaaattacacgccagatttgccaagagcagatgtggaccatgccattgagaaagccttccaactctggagtaatgtcacacctctgacattcaccaaggtctctgagggtcaagcagacatcatgatatcttttgtcaggggagatcatcgggacaactctccttttgatggacctggaggaaatcttgctcatgcttttcaaccaggcccaggtattggaggggatgctcattttgatgaagatgaaaggtggaccaacaatttcagagagtacaacttacatcgtgttgcggctcatgaactcggccattctcttggactctcccattctactgatatcggggctttgatgtaccctagctacaccttcagtggtgatgttcagctagctcaggatgacattgatggcatccaagccatatatggacgttcccaaaatcctgtccagcccatcggcccacaaaccccaaaagcgtgtgacagtaagctaacctttgatgctataactacgattcggggagaagtgatgttctttaaagacagattctacatgcgcacaaatcccttctacccggaagttgagctcaatttcatttctgttttctggccacaactgccaaatgggcttgaagctgcttacgaatttgccgacagagatgaagtccggtttttcaaagggaataagtactgggctgttcagggacagaatgtgctacacggataccccaaggacatctacagctcctttggcttccctagaactgtgaagcatatcgatgctgctctttctgaggaaaacactggaaaaacctacttctttgttgctaacaaatactggaggtatgatgaatataaacgatctatggatccaggttatcccaaaatgatagcacatgactttcctggaattggccacaaagttgatgcagttttcatgaaagatggatttttctatttctttcatggaacaagacaatacaaatttgatcctaaaacgaagagaattttgactctccagaaagctaatagctggttcaactgcaggaaaaattgaacattactaatttgaatggaaaacacatggtgtgagtccaaagaaggtgttttcctgaagaactgtctattttctcagtcatttttaacctctagagtcactgatacacagaatataatcttatttatacctcagtttgcatatttttttactatttagaatgtagccctttttgtactgatataatttagttccacaaatggtgggtacaaaaagtcaagtttgtggcttatggattcatataggccagagttgcaaagatcttttccagagtatgcaactctgacgttgatcccagagagcagcttcagtgacaaacatatcctttcaagacagaaagagacaggagacatgagtctttgccggaggaaaagcagctcaagaacacatgtgcagtcactggtgtcaccctggataggcaagggataactcttctaacacaaaataagtgttttatgtttggaataaagtcaaccttgtttctactgtttt

SEQ ID NO: 43 - DNA, 1127 bp, Homo sapiens
accaaatcaaccataggtccaagaacaattgtctctggacggcagctatgcgactcaccgtgctgtgtgctgtgtgcctgctgcctggcagcctggccctgccgctgcctcaggaggcgggaggcatgagtgagctacagtgggaacaggctcaggactatctcaagagattttatctctatgactcagaaacaaaaaatgccaacagtttagaagccaaactcaaggagatgcaaaaattctttggcctacctataactggaatgttaaactcccgcgtcatagaaataatgcagaagcccagatgtggagtgccagatgttgcagaatactcactatttccaaatagcccaaaatggacttccaaagtggtcacctacaggatcgtatcatatactcgagacttaccgcatattacagtggatcgattagtgtcaaaggctttaaacatgtggggcaaagagatccccctgcatttcaggaaagttgtatggggaactgctgacatcatgattggctttgcgcgaggagctcatggggactcctacccatttgatgggccaggaaacacgctggctcatgcctttgcgcctgggacaggtctcggaggagatgctcacttcgatgaggatgaacgctggacggatggtagcagtctagggattaacttcctgtatgctgcaactcatgaacttggccattctttgggtatgggacattcctctgatcctaatgcagtgatgtatccaacctatggaaatggagatccccaaaattttaaactttcccaggatgatattaaaggcattcagaaactatatggaaagagaagtaattcaagaaagaaatagaaacttcaggcagaacatccattcattcattcattggattgtatatcattgttgcacaatcagaattgataagcactgttcctccactccatttagcaattatgtcacccttttttattgcagttggtttttgaatgtctttcactccttttattggttaaactcctttatggtgtgactgtgtcttattccatctatgagctttgtcagtgcgcgtagatgtcaataaatgttacatacacaaataaataaaatgtttattccatggtaaattta

SEQ ID NO: 44 - DNA, 1163 bp, Homo sapiens
agatccagcaggtgcgcgaaaccgcggcgcgccgccctccgccgttatatgaggccccgctccggccccacgcggaacccgcggctccgagccttcgccggcgtcccgacccgaggccggacccgaggccagtcccgccgctgcgcagccgaagccagtgcggggcctgagagggacgcgcgccccggggcccccgccgcgggcaccatgggcgctgcccactccgcgtctgaggaggtgcgggagctcgagggcaagaccggcttctcatcggatcagatcgagcagctccatcggagatttaagcagctgagtggagatcagcctaccattcgcaaggagaacttcaacaatgtcccggacctggagctcaaccccatccgatccaaaattgttcgtgccttcttcgacaacaggaacctgcgcaagggacccagtggcctggctgatgagatcaatttcgaggacttcctgaccatcatgtcctacttccggcccatcgacaccaccatggacgaggaacaggtggagctgtcccggaaggagaagctgagatttctgttccacatgtacgactcggacagcgacggccgcatcactctggaagaatatcgaaatgtaaagtggtcgaggagctgctgtcgggaaaccctcacatctagaaggagtccgctcgctccatcgccgacggggccatgatggaggcggccagcgtgtgcatggggcagatggagcctgatcaggtgtacgaggggatcaccttcgaggacttcctgaagatctggcaggggatcgacattgagaccaagatgcacgtccgcttccttaacatggaaaccatggccctctgccactgacccaccgccacctccgcggagagactgcactttgcaatggggccgcctccccgcgtagctggagcagcccaggcccggcggacagcctcttcctgcagcgccggtacatagccaaggctcgtctgcgcaccttgtgtcttgtagggtatggtatgtgggacttcgctgtttttatctccaataaaaaaaaaaaaaaaaggtttgttaattaaaaaaaaaaaaaaaaagaaaaaaaaaaaaaaaaaaaaaaaaaaaaaagaaaaaaaaaaaaaaaaaaaaaaaaaaaaaaaaaaaaaaaaaaaaaaa

SEQ ID NO: 45 - DNA, 2007 bp, Homo sapiens
agcggagggggaaatcctgagcgcaggccagggttgtttggttttgaggtgtgctgggatgaaaggcaccctggaagtggaaggtaaatgagcaatggaaaaacttcacggcaagattagaaagatacctgagcccaatacccgcctgatgtcgtgggccacacctccgggttaccaggggaagggaggaagcaaactgtcatattgatgtggctctaaacaacaacagtgtgcgaaggcccaggggcactttgggattgaccaagaggaaacacaagttgcacaatgatacaatcttgttggtacaattgtcagagaagggaactcccacagcaaaggccataaaaccatccagggcagtctggggcggctcagttctgcggtgccagggagtggagcagagctcagccccgtcccaaacacagatgggaccatgaactccggacacagcttcagccagaccccctcggcctccttccatggcgccggaggtggctggggccggcccaggagcttccccagggctcccaccgtccatggcggtgcggggggagcccgcatctccctgtccttcaccacgcggagctgcccaccccctggagggtcttggggttctggaagaagcagccccctactaggcggaaatgggaaggccaccatgcagaatctcaacgaccgcctggcctcctacgtggagaaggttcgcgccctggaggaggccaacatgaagctggaaagccgcatcctgaaatggcaccagcagagagatcctggcagtaagaaagattattcacagtatgaggaaaacatcacacacctgcaggagcagatagtggatggtaagatgaccaatgctcagattattcttctcattgacaatgccaggatggcagtggatgacttcaacctcaagtatgaaaatgaacactcctttaagaaagacttggaaattgaagtcgagggcctccgaaggaccttagacaacctgaccattgtcacaacagacctagaacaggaggtggaaggaatgaggaaagagctcattctcatgaagaagcaccatgagcaggaaatggagaagcatcatgtgccaagtgacttcaatgtcaatgtgaaggtggatacgggtcccagggaagatctgattaaggtcctggaggatatgagacaagaatatgagcttataataaagaagaagcatcgagacttggacacttggtataaagaacagtctgcagccatgtcccaggaggcagccagtccagccactgtgcagagcagacaaggtgacatccacgaactgaagcgcacattccaggccctggagattgacctgcagacacagtacagcacgaaatctgctttggaaaacatgttatccgagacccagtctcggtactcctgcaagctccaggacatgcaagagatcatctcccactatgaggaggaactgacgcagctacgccatgaactggagcggcagaacaatgaataccaagtgctgctgggcatcaaaacccacctggagaaggaaatcaccacgtaccgacggctcctggagggagagagtgaagggacacgggaagaatcaaagtcgagcatgaaagtgtttgcaactccaaagatcaaggccataacccaggagaccatcaacggaagattagttctttgtcaagtgaatgaaatccaaaagcacgcatgagaccaatgaaagtttccgcctgttgtaaaatctattttcccccaaggaaagtccttgcacagacaccagtgagtgagttctaaaagatacccttggaattatcagactcagaaacttttattttttttttctgtaactgtctcaccagacttctcataatgctcttaatatattgcacttttctaatcaaagtgcgagtttatgagggtaaagctctactttcctactgcagccttcagattctcatcattttgcatctattttgtagccaataaaactccgcactagcaaaaaaaaaaaaaaaa

SEQ ID NO: 46 - DNA, 1650 bp, Homo sapiens
gccttttttgcagtctcaggacgggcgctttggagccggccccaggcagcgtgtgtcggtcgcctagtctggagaactagtcctcgactcacggtgagggaatggaccgacacgggtattgtaccgctgagggaaaggagcgggactccggacctccaggagtgcaaggatgatgctgaaaggaataacaaggcttatctctaggatccataagttggaccctgggcgttttttacacatggggacccaggctcgccaaagcattgctgctcacctagataaccaggttccagttgagagtccgagagctatttcccgcaccaatgagaatgacccggccaagcatggggatcagcacgagggtcagcactacaacatctccccccaggatttggagactgtatttccccatggccttcctcctcgctttgtgatgcaggtgaagacattcagtgaagcttgcctgatggtaaggaaaccagccctagaacttctgcattacctgaaaaacaccagttttgcttatccagctatacgatatcttctgtatggagagaagggaacaggaaaaaccctaagtctttgccatgttattcatttctgtgcaaaacaggactggctgatactacatattccagatgctcatctttgggtgaaaaattgtcgggatcttctgcagtccagctacaacaaacagcgctttgatcaacctttagaggcttcaacctggctgaagaatttcaaaactacaaatgagcgcttcctgaaccagataaaagttcaagagaagtatgtctggaataagagagaaagcactgagaaagggagtcctctgggagaagtggttgaacagggcataacacgggtgaggaacgccacagatgcagttggaattgtgctgaaagagctaaagaggcaaagttctttgggtatgtttcacctcctagtggccgtggatggaatcaatgctctttggggaagaaccactctgaaaagagaagataaaagcccgattgcccccgaggaattagcacttgttcacaacttgaggaaaatgatgaaaaatgattggcatggaggcgccattgtgtcggctttgagccagactgggtctctctttaagccccggaaagcctatctgccccaggagttgctgggaaaggaaggatttgatgccctggatccctttattcccatcctggtttccaactataacccaaaggaatttgaaagttgtattcagtattatttggaaaacaattggcttcaacatgagaaagctcctacagaagaagggaaaaaagagctgctgttcctaagtaacgcgaacccctcgctgctggagcggcactgtgcctacctctaagccaagatcacagcatgtgaggaagacagtggacatctgctttatgctggacccagtaagatgaggaagtcgggcagtacacaggaagaggagccaggcccttgtacctatgggattggacaggactgcagttggctctggacctgcattaaaatgggtttcactgtgaatgcgtgacaataagatattcccttgttcctaaaactttatatcagtttattggatgtggtttttcacatttaagataattatggctcttttcctaaaaaataaaatatctttct

SEQ ID NO: 47 - DNA, 2566 bp, Homo sapiens
cgctttttttttttttttctttttttgagatggagcttgctctgtcacccaggctggagtgcagtggcacgatcacagctcactgcaacttccgccacctgggttcaagcaattttcctgcttcaacctcccgagtagttgagattacaggcacgtgccaccacacctgactgatttttgtatttttagtagagacagggtttcaccatgttggccaggctggtcttgaactcctgacctcaagtgatccacccacctcagtctaccaaagtgctgggattacaggttgtgagccactgcacccggcctctgtctgacttttaaatgatggagtatcccagaggtcaggctttagagctcttctttcttccatctacagagtgctcatttctttggtgatctcattcagtctcacggctttgaatgttatatgctgataagtcccaactttctctgtctcgcctaaacttcccctaatagcagaacctgatatcaaagtgcctatttgacatctccacttagatatctaataagcatctttaatgtaaaatttccaaaactgagctcctacaattccctcccacacttgttcagttttccccatctaagctaatggcaactccatccctccagttgctttggccaaaacttttgagttgtctttgactgctttttttctcccttcttacattgtgctcatcctttctttcaggcaaattctgtttggtataccttcaaatatatctagaattctatacttctcactacccctcattcccattatctttgaaacacactccaatgaggtttttacccccactattccaccaaaaacactcttgtgaaagtcaccagatgatggttcttcaggctatcatctgtctcctgaattattttaagagcctccctaactggtctccttgttccagcccctgctcccttcactctattctcaatacaacagtcagagggatcttataaaaccgtaagtcagatcatataattctgtgtgaaaccctccaatgttatcccacttcagagtaaaagttaaagggtttattttgatctctaaatattttgatccctatgatctagtctcttcttacccaaagtatgggcctcataccagcagaactggcattctctgggagcttgttagaaatgtagaatctctggtcctaagattttctaaatcagaatctgcattttcatcagctctcttggcaattcatatgtttgagaaggactgatgtagtcctctactgcctctcctgctgctatgtgctgctctagtcacactgtcctcctggctatttcgataagatggaaactctcctgcctcagggcttttgcacctactgctccctctgtctaggataatcttccccagaaaactgcatgccagttgccttatttccttcaggtctttattgaagtcactttctcattaaacactttctggcccatcctgtctaaaactgcatccccaaacccttcctatcccttttctccacttttttctttttttaaactatagttcttatcaacatagtatatgttttgcttatttatcctgtttattgtctgactcaacaagtataatttgacaaagaaaaatgatacttctctttttttgctgttccaccaaatacaattcaaatgctttttgttttatttttttaccaattccaatttcaaaatgtctcaatggtgctataataaataaacttcaacactctttatgataacaacactgtgttatattctttgaatcctagcccatctgcagagcaatgactgtgctcaccagtaaaagataacctttctttctgaaatagtcaaatacgaaattagaaaagccctccctattttaactacctcaactggtcagaaacacagattgtattctatgagtcccagaagatgaaaaaaattttatacgttgataaaacttataaatttcattgattaatctcctggaagattggtttaaaaagaaaagtgtaatgcaagaatttaaagaaatatttttaaagccacaattattttaatattggatatcaactgcttgtaaaggtgctcctcctttttcttgtcattgctggtcaagattactaatatttgggaaggctttaaagacgcatgttatggtgctaatgtactttcacttttaaactctagatcagaattgttgacttgcattcagaacataaatgcacaaaatctgtacatgtctcccatcagaaagattcattggcatgccacaggggattctcctccttcatcctgtaaaggtcaacaataaaaaccaaattatggggctgcttttgtcacactagcatagagaatgtgttgaaatttaactttgtaagcttgtatgtggttgttgatcttttttttccttacagacacccataataaaatatcatattaaaaaaaaaaaaaaaaaaaaaaaaaaaaaaaaaaaaaaaaaaaaaaaaaaaaaaaaaaaaaaaaaaaaaaaaaaaaaaaaaaaaaaaaaaaaaaaaaaaaaaaaaaaaaaaaaaaaaaaaaaaaaaaaaaaaaa

SEQ ID NO: 48 - DNA, 2067 bp, Homo sapiens
cgctttttttttttttttttatgaataaattgtatgtgtttctagctgaaactactcaccaatatgcatgttaaattcaatcctctcttacctattctttgatataactccttgaagttttcccattctcctacatcatctcccccacccccactgagtcatttctataatacaaacatattatctttttattaaattaaaaatctacctgtacaccttgaatgacaatgctcggagctcccctgtggtcatcgacgcctccactgccattgatgcaccatccaacctgcgtttcctggccaccacacccaattccttgctggtatcatggcagccgccacgtgccaggattaccggctacatcatcaagtatgagaagcctgggtctcctcccagagaagtggtccctcggccccgccctggtgtcacagaggctactattactggcctggaaccgggaaccgaatatacaatttatgtcattgccctgaagaataatcagaagagcgagcccctgattggaaggaaaaagacaggacaagaagctctctctcagacaaccatctcatgggccccattccaggacacttctgagtacatcatttcatgtcatcctgttggcactgatgaagaacccttacagttcagggttcctggaacttctaccagtgccactctgacaggcctcaccagaggtgccacctacaacatcatagtggaggcactgaaagaccagcagaggcataaggttcgggaagaggttgttaccgtgggcaactctgtcaacgaaggcttgaaccaacctacggatgactcgtgctttgacccctacacagtttcccattatgccgttggagatgagtgggaacgaatgtctgaatcaggctttaaactgttgtgccagtgcttaggctttggaagtggtcatttcagatgtgattcatctagatggtgccatgacaatggtgtgaactacaagattggagagaagtgggaccgtcagggagaaaatggccagatgatgagctgcacatgtcttgggaacggaaaaggagaattcaagtgtgaccctcatgaggcaacgtgttatgatgatgggaagacataccacgtaggagaacagtggcagaaggaatatctcggtgccatttgctcctgcacatgctttggaggccagcggggctggcgctgtgacaactgccgcagacctgggggtgaacccagtcccgaaggcactactggccagtcctacaaccagtattctcagagataccatcagagaacaaacactaatgttaattgcccaattgagtgcttcatgcctttagatgtacaggctgacagagaagattcccgagagtaaatcatctttccaatccagaggaacaagcatgtctctctgccaagatccatctaaactggagtgatgttagcagacccagcttagagttcttctttctttcttaagccctttgctctggaggaagttctccagcttcagctcaactcacagcttctccaagcatcaccctgggagtttcctgagggttttctcataaatgagggctgcacattgcctgttctgcttcgaagtattcaataccgctcagtattttaaatgaagtgattctaagatttggtttgggatcaataggaaagcatatgcagccaaccaagatgcaaatgttttgaaatgatatgaccaaaattttaagtaggaaagtcacccaaacacttctgctttcacttaagtgtctggcccgcaatactgtaggaacaagcatgatcttgttactgtgatattttaaatatccacagtactcactttttccaaatgatcctagtaattgcctagaaatatctttctcttacctgttatttatcaatttttcccagtatttttatacggaaaaaattgtattgaaaacacttagtatgcagttgataagaggaatttggtataattatggtgggtgattattttttatactgtatgtgccaaagctttactactgtggaaagacaactgttttaataaaagatttacattccaaaaaaaaaaaaaaa

SEQ ID NO: 49 - DNA, 1752 bp, Homo sapiens
ctgctccttctaggatctccgcctggttcggcccgcctgcctccactcctgcctccaccatgtccatcagggtgacccagaagtcctacaaggtgtccacctctggcccccgggccttcagcagccgctcctacacgagtgggcccggttcccgcatcagctcctcgagcttctcccgagtgggcagcagcaactttcgcggtggcctgggcggcggctatggtggggccagcggcatgggaggcatcaccgcagttacggtcaaccagagcctgctgagcccccttgtcctggaggtggaccccaacatccaggccgtgcgcacccaggagaaggagcagatcaagaccctcaacaacaagtttgcctccttcatagacaaggtacggttcctggagcagcagaacaagatgctggagaccaagtggagcctcctgcagcagcagaagacggctcgaagcaacatggacaacatgttcgagagctacatcaacaaccttaggcggcagctggagactctgggccaggagaagctgaagctggaggcggagcttggcaacatgcaggggctggtggaggacttcaagaacaagtatgaggatgagatcaataagcgtacagagatggagaacgaatttgtcctcatcaagaaggatgtggatgaagcttacatgaacaaggtagagctggagtctcgcctggaagggctgaccgacgagatcaacttcctcaggcagctatatgaagaggagatccgggagctgcagtcccagatctcggacacatctgtggtgctgtccatggacaacagccgctccctggacatggacagcatcattgctgaggtcaaggcacagtacgaggatattgccaaccgcagccgggctgaggctgagagcatgtaccagatcaagtatgaggagctgcagagcctggctgggaagcacggggatgacctgcggcgcacaaagactgagatctctgagatgaaccggaacatcagccggctccaggctgagattgagggcctcaaaggccagagggcttccctggaggccgccattgcagatgccgagcagcgtggagagctggccattaaggatgccaacgccaagttgtccgagctggaggccgccctgcagcgggccaagcaggacatggcgcggcagctgcgtgagtaccaggagctgatgaacgtcaagctggccctggacatcgagatcgccacctacaggaagctgctggagggcgaggagagccggctggagtctgggatgcagaacatgagtattcatacgaagaccaccagcggctatgcaggtggtctgagctcggcctatgggggcctcacaagccccggcctcagctacagcctgggctccagctttggctctggcgcgggctccagctccttcagccgcaccagctcctccagggccgtggttgtgaagaagatcgagacacgtgatgggaagctggtgtctgagtcctctgacgtcctgcccaagtgaacagctgcggcagcccctcccagcctacccctcctgcgctgccccagagcctgggaaggaggccgctatgcagggtagcactgggaacaggagacccacctgaggctcagccctagccctcagcccacctggggagtttactacctggggaccccccttgcccatgcctccagctacaaaacaattcaattgctttttttttttggtccaaaataaaacctcagctagctctgccaaaccc

SEQ ID NO: 50 - DNA, 1412 bp, Homo sapiens
cggggtcgtccgcaaagcctgagtcctgtcctttctctctccccggacagcatgagcttcaccactcgctccaccttctccaccaactaccggtccctgggctctgtccaggcgcccagctacggcgcccggccggtcagcagcgcggccagcgtctatgcaggcgctgggggctctggttcccggatctccgtgtcccgctccaccagcttcaggggcggcatggggtccgggggcctggccaccgggatagccgggggtctggcaggaatgggaggcatccagaacgagaaggagaccatgcaaagcctgaacgaccgcctggcctcttacctggacagagtgaggagcctggagaccgagaaccggaggctggagagcaaaatccgggagcacttggagaagaagggaccccaggtcagagactggagccattacttcaagatcatcgaggacctgagggctcagatcttcgcaaatactgtggacaatgcccgcatcgttctgcagattgacaatgcccgtcttgctgctgatgactttagagtcaagtatgagacagagctggccatgcgccagtctgtggagaacgacatccatgggctccgcaaggtcattgatgacaccaatatcacacgactgcagctggagacagagatcgaggctctcaaggaggagctgctcttcatgaagaagaaccacgaagaggaagtaaaaggcctacaagcccagattgccagctctgggttgaccgtggaggtagatgcccccaaatctcaggacctcgccaagatcatggcagacatccgggcccaatatgacgagctggctcggaagaaccgagaggagctagacaagtactggtctcagcagattgaggagagcaccacagtggtcaccacacagtctgctgaggttggagctgctgagacgacgctcacagagctgagacgtacagtccagtccttggagatcgacctggactccatgagaaatctgaaggccagcttggagaacagcctgagggaggtggaggcccgctacgccctacagatggagcagctcaacgggatcctgctgcaccttgagtcagagctggcacagacccgggcagagggacagcgccaggcccaggagtatgaggccctgctgaacatcaaggtcaagctggaggctgagatcgccacctaccgccgcctgctggaagatggcgaggactttaatcttggtgatgccttggacagcagcaactccatgcaaaccatccaaaagaccaccacccgccggatagtggatggcaaagtggtgtctgagaccaatgacaccaaagttctgaggcattaagccagcagaagcagggtaccctttggggagcaggaggccaataaaaagttcagagttcattggatgtc

SEQ ID NO: 51 - DNA, 1407 bp, Homo sapiens
cgcgaatcgcagcttctgagaccagggttgctccgtccgtgctccgcctcgccatgacttcctacagctatcgccagtcgtcggccacgtcgtccttcggaggcctgggcggcggctccgtgcgttttgggccgggggtcgcctttcgcgcgcccagcattcacgggggctccggcggccgcggcgtatccgtgtcctccgcccgctttgtgtcctcgtcctcctcgggggcctacggcggcggctacggcggcgtcctgaccgcgtccgacgggctgctggcgggcaacgagaagctaaccatgcagaacctcaacgaccgcctggcctcctacctggacaaggtgcgcgccctggaggcggccaacggcgagctagaggtgaagatccgcgactggtaccagaagcaggggcctgggccctcccgcgactacagccactactacacgaccatccaggacctgcgggacaagattcttggtgccaccattgagaactccaggattgtcctgcagatcgacaatgcccgtctggctgcagatgacttccgaaccaagtttgagacggaacaggctctgcgcatgagcgtggaggccgacatcaacggcctgcgcagggtgctggatgagctgaccctggccaggaccgacctggagatgcagatcgaaggcctgaaggaagagctggcctacctgaagaagaaccatgaggaggaaatcagtacgctgaggggccaagtgggaggccaggtcagtgtggaggtggattccgctccgggcaccgatctcgccaagatcctgagtgacatgcgaagccaatatgaggtcatggccgagcagaaccggaaggatgctgaagcctggttcaccagccggactgaagaattgaaccgggaggtcgctggccacacggagcagctccagatgagcaggtccgaggttactgacctgcggcgcacccttcagggtcttgagattgagctgcagtcacagctgagcatgaaagctgccttggaagacacactggcagaaacggaggcgcgctttggagcccagctggcgcatatccaggcgctgatcagcggtattgaagcccagctgggcgatgtgcgagctgatagtgagcggcagaatcaggagtaccagcggctcatggacatcaagtcgcggctggagcaggagattgccacctaccgcagcctgctcgagggacaggaagatcactacaacaatttgtctgcctccaaggtcctctgaggcagcaggctctggggcttctgctgtcctttggagggtgtcttctgggtagagggatgggaaggaagggacccttacccccggctcttctcctgacctgccaataaaaatttatggtccaagggaaaaaaaaaaaaaaaaaaaaaaaaaa

SEQ ID NO: 52 - DNA, 1723 bp, Homo sapiens
caaccatcctgaagctacaggtgctccctcctggaatctccaatggatttcagtcgcagaagcttccacagaagcctgagctcctccttgcaggcccctgtagtcagtacagtgggcatgcagcgcctcgggacgacacccagcgtttatgggggtgctggaggccggggcatccgcatctccaactccagacacacggtgaactatgggagcgatctcacaggcggcggggacctgtttgttggcaatgagaaaatggccatgcagaacctaaatgaccgtctagcgagctacctagaaaaggtgcggaccctggagcagtccaactccaaacttgaagtgcaaatcaagcagtggtacgaaaccaacgccccgagggctggtcgcgactacagtgcatattacagacaaattgaagagctgcgaagtcagattaaggatgctcaactgcaaaatgctcggtgtgtcctgcaaattgataatgctaaactggctgctgaggacttcagactgaagtatgagactgagagaggaatacgtctaacagtggaagctgatctccaaggcctgaataaggtctttgatgacctaaccctacataaaacagatttggagattcaaattgaagaactgaataaagacctagctctcctcaaaaaggagcatcaggaggaagtcgatggcctacacaagcatctgggcaacactgtcaatgtggaggttgatgctgctccaggcctgaaccttggcgtcatcatgaatgaaatgaggcagaagtatgaagtcatggcccagaagaaccttcaagaggccaaagaacagtttgagagacagactgcagttctgcagcaacaggtcacagtgaatactgaagaattaaaaggaactgaggttcaactaacggagctgagacgcacctcccagagccttgagatagaactccagtcccatctcagcatgaaagagtctttggagcacactctagaggagaccaaggcccgttacagcagccagttagccaacctccagtcgctgttgagctctctggaggcccaactgatgcagattcggagtaacatggaacgccagaacaacgaataccatatccttcttgacataaagactcgacttgaacaggaaattgctacttaccgccgccttctggaaggagaagacgtaaaaactacagaatatcagttaagcaccctggaagagagagatataaagaaaaccaggaagattaagacagtcgtgcaagaagtagtggatggcaaggtcgtgtcatctgaagtcaaagaggtggaagaaaatatctaaatagctaccagaaggagatgctgctgaggttttgaaagaaatttggctataatcttatctttgctccctgcaagaaatcagccataagaaagcactattaatactctgcagtgattagaaggggtggggtggcgggaatcctatttatcagactctgtaattgaatataaatgttttactcagaggagctgcaaattgcctgcaaaaatgaaatccagtgagcactagaatatttaaaacatcattactgccatctttatcatgaagcacatcaattacaagctgtagaccacctaatatcaatttgtaggtaatgttcctgaaaattgcaatacatttcaattatactaaacctcacaaagtagaggaatccatgtaaattgcaaataaaccactttctaatttt

SEQ ID NO: 53 - DNA, 4139 bp, Homo sapiens
ccgctccacctctcaagcagccagcgcctgcctgaatctgttctgccccctccccacccatttcaccaccaccatgacaccgggcacccagtctcctttcttcctgctgctgctcctcacagtgcttacagttgttacaggttctggtcatgcaagctctaccccaggtggagaaaaggagacttcggctacccagagaagttcagtgcccagctctactgagaagaatgctgtgagtatgaccagcagcgtactctccagccacagccccggttcaggctcctccaccactcagggacaggatgtcactctggccccggccacggaaccagcttcaggttcagctgccacctggggacaggatgtcacctcggtcccagtcaccaggccagccctgggctccaccaccccgccagcccacgatgtcacctcagccccggacaacaagccagccccgggctccaccgcccccccagcccacggtgtcacctcggccccggacaccaggccggccccgggctccaccgcccccccagcccacggtgtcacctcggccccggacaccaggccggccccgggctccaccgcccccccagcccacggtgtcacctcggccccggacaccaggccggccccgggctccaccgcccccccagcccacggtgtcacctcggccccggacaccaggccggccccgggctccaccgcccccccagcccacggtgtcacctcggccccggacaccaggccggccccgggctccaccgcccccccagcccacggtgtcacctcggccccggacaccaggccggccccgggctccaccgcccccccagcccacggtgtcacctcggccccggacaccaggccggccccgggctccaccgcccccccagcccacggtgtcacctcggccccggacaccaggccggccccgggctccaccgcccccccagcccacggtgtcacctcggccccggacaccaggccggccccgggctccaccgcccccccagcccacggtgtcacctcggccccggacaccaggccggccccgggctccaccgcccccccagcccacggtgtcacctcggccccggacaccaggccggccccgggctccaccgcccccccagcccacggtgtcacctcggccccggacaccaggccggccccgggctccaccgcccccccagcccacggtgtcacctcggccccggacaccaggccggccccgggctccaccgcccccccagcccacggtgtcacctcggccccggacaccaggccggccccgggctccaccgcccccccagcccacggtgtcacctcggccccggacaccaggccggccccgggctccaccgcccccccagcccacggtgtcacctcggccccggacaccaggccggccccgggctccaccgcccccccagcccacggtgtcacctcggccccggacaccaggccggccccgggctccaccgcccccccagcccacggtgtcacctcggccccggacaccaggccggccccgggctccaccgcccccccagcccacggtgtcacctcggccccggacaccaggccggccccgggctccaccgcccccccagcccacggtgtcacctcggccccggacaccaggccggccccgggctccaccgcccccccagcccacggtgtcacctcggccccggacaccaggccggccccgggctccaccgcccccccagcccacggtgtcacctcggccccggacaccaggccggccccgggctccaccgcccccccagcccacggtgtcacctcggccccggacaccaggccggccccgggctccaccgcccccccagcccacggtgtcacctcggccccggacaccaggccggccccgggctccaccgcccccccagcccacggtgtcacctcggccccggacaccaggccggccccgggctccaccgcccccccagcccacggtgtcacctcggccccggacaccaggccggccccgggctccaccgcccccccagcccacggtgtcacctcggccccggacaccaggccggccccgggctccaccgcccccccagcccacggtgtcacctcggccccggacaccaggccggccccgggctccaccgcccccccagcccacggtgtcacctcggccccggacaccaggccggccccgggctccaccgcccccccagcccacggtgtcacctcggccccggacaccaggccggccccgggctccaccgcccccccagcccacggtgtcacctcggccccggacaccaggccggccccgggctccaccgcccccccagcccacggtgtcacctcggccccggacaccaggccggccccgggctccaccgcccccccagcccacggtgtcacctcggccccggacaccaggccggccccgggctccaccgcccccccagcccacggtgtcacctcggccccggacaccaggccggccccgggctccaccgcccccccagcccacggtgtcacctcggccccggacaccaggccggccccgggctccaccgcccccccagcccacggtgtcacctcggccccggacaccaggccggccccgggctccaccgcccccccagcccacggtgtcacctcggccccggacaccaggccggccccgggctccaccgcccccccagcccacggtgtcacctcggccccggacaccaggccggccccgggctccaccgcccccccagcccacggtgtcacctcggccccggacaccaggccggccccgggctccaccgcccccccagcccacggtgtcacctcggccccggacaccaggccggccccgggctccaccgcccccccagcccatggtgtcacctcggccccggacaacaggcccgccttgggctccaccgcccctccagtccacaatgtcacctcggcctcaggctctgcatcaggctcagcttctactctggtgcacaacggcacctctgccagggctaccacaaccccagccagcaagagcactccattctcaattcccagccaccactctgatactcctaccacccttgccagccatagcaccaagactgatgccagtagcactcaccatagctcggtacctcctctcacctcctccaatcacagcacttctccccagttgtctactggggtctctttctttttcctgtcttttcacatttcaaacctccagtttaattcctctctggaagatcccagcaccgactactaccaagagctgcagagagacatttctgaaatgtttttgcagatttataaacaagggggttttctgggcctctccaatattaagttcaggccaggatctgtggtggtacaattgactctggccttccgagaaggtaccatcaatgtccacgacgtggagacacagttcaatcagtataaaacggaagcagcctctcgatataacctgacgatctcagacgtcagcgtgagtgatgtgccatttcctttctctgcccagtctggggctggggtgccaggctggggcatcgcgctgctggtgctggtctgtgttctggttgcgctggccattgtctatctcattgccttggctgtctgtcagtgccgccgaaagaactacgggcagctggacatctttccagcccgggatacctaccatcctatgagcgagtaccccacctaccacacccatgggcgctatgtgccccctagcagtaccgatcgtagcccctatgagaaggtttctgcaggtaacggtggcagcagcctctcttacacaaacccagcagtggcagccgcttctgccaacttgtagggcacgtcgccgctgagctgagtggccagccagtgccattccactccactcaggttcttcaggccagagcccctgcaccctgtttgggctggtgagctgggagttcaggtgggctgctcacagcctccttcagaggccccaccaatttctcggacacttctcagtgtgtggaagctcatgtgggcccctgaggctcatgcctgggaagtgttgtgggggctcccaggaggactggcccagagagccctgagatagcggggatcctgaactggactgaataaaacgtggtctcccactg

SEQ ID NO: 54 - DNA, 15720 bp, Homo sapiens
caacccacaccgcccctgccagccaccatggggctgccactagcccgcctggcggctgtgtgcctggccctgtctttggcagggggctcggagctccagacagagggcagaacccgataccacggccgcaacgtctgcagcacctggggcaacttccactacaagaccttcgacggggacgtcttccgcttccccggcctctgcgactacaacttcgcctccgactgccgaggctcctacaaggaatttgctgtgcacctgaagcggggtccgggccaggctgaggcccccgccggggtggagtccatcctgctgaccatcaaggatgacaccatctacctcacccgccacctggctgtgcttaacggggccgtggtcagcaccccgcactacagccccgggctgctcattgagaagagcgatgcctacaccaaagtctactcccgcgccggcctcaccctcatgtggaaccgggaggatgcactcatgctggagctggacactaagttccggaaccacacctgtggcctctgcggggactacaacggcctgcagagctattcagaattcctctctgacggcgtgctcttcagtcccctggagtttgggaacatgcagaagatcaaccagcccgatgtggtgtgtgaggatcccgaggaggaggtggcccccgcatcctgctccgagcaccgcgccgagtgtgagaggctgctgaccgccgaggccttcgcggactgtcaggacctggtgccgctggagccgtatctgcgcgcctgccagcaggaccgctgccggtgcccgggcggtgacacctgcgtctgcagcaccgtggccgagttctcccgccagtgctcccacgccggcggccggcccgggaactggaggaccgccacgctctgccccaagacctgccccgggaacctggtgtacctggagagcggctcgccctgcatggacacctgctcacacctggaggtgagcagcctgtgcgaggagcaccgcatggacggctgtttctgcccagaaggcaccgtatatgacgacatcggggacagtggctgcgttcctgtgagccagtgccactgcaggctgcacggacacctgtacacaccgggccaggagatcaccaatgactgcgagcagtgtgtctgtaacgctggccgctgggtgtgcaaagacctgccctgccccggcacctgtgccctggaaggcggctcccacatcaccaccttcgatgggaagacgtacaccttccacggggactgctactatgtcctggccaagggtgaccacaacgattcctacgctctcctgggcgagctggccccctgtggctccacagacaagcagacctgcctgaagacggtggtgctgctggctgacaagaagaagaatgcggtggtcttcaagtccgatggcagtgtactgctcaaccagctgcaggtgaacctgccccacgtgaccgcgagcttctctgtcttccgcccgtcttcctaccacatcatggtgagcatggccattggcgtccggctgcaggtgcagctggccccagtcatgcaactctttgtgacactggaccaggcctcccaggggcaggtgcagggcctctgcgggaacttcaacggcctggaaggtgacgacttcaagacggccagcgggctggtggaggccacgggggccggctttgccaacacctggaaggcacagtcaacctgccatgacaagctggactggttggacgatccctgctccctgaacatcgagagcgccaactacgccgagcactggtgctccctcctgaagaagacagagaccccctttggcaggtgccactcggctgtggaccctgctgagtattacaagaggtgcaaatatgacacgtgtaactgtcagaacaatgaggactgcctgtgcgccgccctgtcctcctacgcgcgcgcctgcaccgccaagggcgtcatgctgtggggctggcgggagcatgtctgcaacaaggatgtgggctcctgccccaactcgcaggtcttcctgtacaacctgaccacctgccagcagacctgccgctccctctccgaggccgacagccactgtctcgagggctttgcgcctgtggacggctgcggctgccctgaccacaccttcctggacgagaagggccgctgcgtacccctggccaagtgctcctgttaccaccgcggtctctacctggaggcgggggatgtggtcgtcaggcaggaagaacgatgtgtgtgccgggatgggcggctgcactgtaggcagatccggctgatcggccagagctgcacggccccaaagatccacatggactgcagcaacctgactgcactggccacctcgaagccccgagccctcagctgccagacgctggccgccggctattaccacacagagtgtgtcagtggctgtgtgtgccccgacgggctgatggatgacggccggggtggctgcgtggtggagaaggaatgcccttgcgtccataacaacgacctgtattcttccggcgccaagatcaaggtggactgcaatacctgcacctgcaagagaggacgctgggtgtgcacccaggctgtgtgccatggcacctgctccatttacgggagtggccactacatcacctttgatgggaagtactacgactttgacggacactgctcctacgtggctgttcaggactactgcggccagaactcctcactgggctcattcagcatcatcaccgagaacgtcccctgtggcactacgggcgtcacctgctccaaggccatcaagatcttcatggggaggacggagctgaagttggaagacaagcaccgtgtggtgatccagcgtgatgagggtcaccacgtggcctacaccacgcgggaggtgggccagtacctggtggtggagtccagcacgggcatcatcgtcatctgggacaagaggaccaccgtgttcatcaagctggctccctcctacaagggcaccgtgtgtggcctgtgtgggaactttgaccaccgctccaacaacgacttcaccacgcgggaccacatggtggtgagcagcgagctggacttcgggaacagctggaaggaggcccccacctgcccagatgtgagcaccaaccccgagccctgcagcctgaacccgcaccgccgctcctgggccgagaagcagtgcagcatcctcaaaagcagcgtgttcagcatctgccacagcaaggtggaccccaagcccttctacgaggcctgtgtgcacgactcgtgctcctgtgacacgggtggggactgtgagtgcttctgctctgccgtggcctcctacgcccaggagtgtaccaaagagggggcctgcgtgttctggaggacgccggacctgtgccccatattctgcgactactacaaccctccgcatgagtgtgagtggcactatgagccatgtgggaaccggagcttcgagacctgcaggaccatcaacggcatccactccaacatctccgtgtcctacctggagggctgctacccccggtgccccaaggacaggcccatctatgaggaggatctgaagaagtgtgtcactgcagacaagtgtggctgctatgtcgaggacacccactacccacctggagcatcggttcccaccgaggagacctgcaagtcctgcgtgtgtaccaactcctcccaagtcgtctgcaggccggaggaaggaaagattcttaaccagacccaggatggcgccttctgctactgggagatctgtggccccaacgggacggtggagaagcacttcaacatctgttccattacgacacgcccgtccaccctgaccaccttcaccaccatcaccctccccaccacccccacctccttcaccactaccaccaccaccaccaccccgacctccagcacagttttatcaacaactccgaagctgtgctgcctctggtctgactggatcaatgaggaccaccccagcagtggcagcgacgacggtgaccgagaaccatttgatggggtctgcggggcccctgaggacatcgagtgcaggtcggtcaaggatccccacctcagcttggagcagcatggccagaaggtgcagtgtgatgtctctgttgggttcatttgcaagaatgaagaccagtttggaaatggaccatttggactgtgttacgactacaagatacgtgtcaattgttgctggcccatggataagtgtatcaccactcccagccctccaactaccactcccagccctccaccaaccacgacgaccacccttccaccaaccaccacccccagccctccaaccaccaccacaaccacccctccaccaaccaccacccccagccctccaataaccaccacgaccacccctctaccaaccaccactcccagccctccaataagcaccacaaccacccctccaccaaccaccactcccagccctccaaccaccactcccagccctccaaccaccactcccagccctccaacaaccaccacaaccacccctccaccaaccaccactcccagccctccaatgactacgcccatcactccaccagccagcactaccacccttccaccaaccaccactcccagccctccaacaaccaccacaaccacccctccaccaaccaccactcccagtcctccaacgactacgcccatcactccaccaaccagcactactacccttccaccaaccaccactcccagccctccaccaaccaccacaaccacccctccaccaaccaccactcccagccctccaacaaccaccactcccagtcctccaacaatcaccacaaccacccctccaccaaccaccactcccagccctccaacaacgaccacaaccacccctccaccaaccaccactcccagccctccaacgactacacccatcactccaccaaccagcactaccacccttccaccaaccaccactcccagccctccaccaaccaccacaaccacccctccaccaaccaccactcccagccctccaacaaccaccactcccagccctccaataaccaccacaaccacccctccaccaaccaccactcccagctctccaataaccaccactcccagccctccaacaaccaccatgaccaccccttcaccaaccaccacccccagctctccaataaccaccacaaccaccccttcctcaactaccactcccagccctccaccaaccaccatgaccaccccttcaccaaccaccactcccagccctccaacaaccaccatgaccacccttccaccaaccaccacttccagccctctaacaactactcctctacctccatcaataactcctcctacattttcaccattctcaacgacaacccctactaccccatgcgtgcctctctgcaattggactggctggctggattctggaaaacccaactttcacaaaccaggtggagacacagaattgattggagacgtctgtggaccaggctgggcagctaacatctcttgcagagccaccatgtatcctgatgttcccattggacagcttggacaaacagtggtgtgtgatgtctctgtggggctgatatgcaaaaatgaagaccaaaagccaggtggggtcatccctatggccttctgcctcaactacgagatcaacgttcagtgctgtgagtgtgtcacccaacccaccaccatgacaaccaccaccacagagaacccaactccgccaaccacgacacccatcaccaccaccactacggtgaccccaaccccaacacccaccggcacacagaccccaaccacgacacccatcaccaccaccactacggtgaccccaaccccaacacccaccggcacacagaccccaaccacgacacccatcaccaccaccactacggtgaccccaaccccaacacccaccggcacacagaccccaaccacgacacccatcaccaccaccactacggtgaccccaaccccaacacccaccggcacacagaccccaaccacgacacccatcaccaccaccactacggtgaccccaaccccaacacccaccggcacacagaccccaaccacgacacccatcaccaccaccactacggtgaccccaaccccaacacccaccggcacacagaccccaaccacgacacccatcaccaccaccactacggtgaccccaaccccaacacccaccggcacacagaccccaaccacgacacccatcaccaccaccactacggtgaccccaaccccaacacccaccggcacacagaccccaaccacgacacccatcaccaccaccactacggtgaccccaaccccaacacccaccggcacacagaccccaaccacgacacccatcaccaccaccactacggtgaccccaaccccaacacccaccggcacacagaccccaaccacgacacccatcaccaccaccactacggtgaccccaaccccaacacccaccggcacacagaccccaaccacgacacccatcaccaccaccactacggtgaccccaaccccaacacccaccggcacacagaccccaaccacgacacccatcaccaccaccactacggtgaccccaaccccaacacccaccggcacacagaccccaaccacgacacccatcaccaccaccactacggtgaccccaaccccaacacccaccggcacacagaccccaaccacgacacccatcaccaccaccactacggtgaccccaaccccaacacccaccggcacacagaccccaaccacgacacccatcaccaccaccactacggtgaccccaaccccaacacccaccggcacacagaccccaaccacgacacccatcaccaccaccactacggtgaccccaaccccaacacccaccggcacacagaccccaaccacgacacccatcaccaccaccactacggtgaccccaaccccaacacccaccggcacacagaccccaaccacgacacccatcaccaccaccactacggtgaccccaaccccaacacccaccggcacacagaccccaaccacgacacccatcaccaccaccactacggtgaccccaaccccaacacccaccggcacacagaccccaaccacgacacccatcaccaccaccactacggtgaccccaaccccaacacccaccggcacacagaccccaaccacgacacccatcaccaccaccactacggtgaccccaaccccaacacccaccggcacacagaccccaaccacgacacccatcaccaccaccactacggtgaccccaaccccaacacccaccggcacacagaccccaaccacgacacccatcaccaccaccactacggtgaccccaaccccaacacccaccggcacacagaccccaaccacgacacccatcaccaccaccactacggtgaccccaaccccaacacccaccggcacacagaccccaaccacgacacccatcaccaccaccactacggtgaccccaaccccaacacccaccggcacacagaccccaaccacgacacccatcaccaccaccactacggtgaccccaaccccaacacccaccggcacacagaccccaaccacgacacccatcaccaccaccactacggtgaccccaaccccaacacccaccggcacacagaccccaaccacgacacccatcaccaccaccactacggtgaccccaaccccaacacccaccggcacacagaccccaaccacgacacccatcaccaccaccactacggtgaccccaaccccaacacccaccggcacacagaccccaaccacgacacccatcaccaccaccactacggtgaccccaaccccaacacccaccggcacacagaccccaaccacgacacccatcaccaccaccactacggtgaccccaaccccaacacccaccggcacacagaccccaaccacgacacccatcaccaccaccactacggtgaccccaaccccaacacccaccggcacacagaccccaaccacgacacccatcaccaccaccactacggtgaccccaaccccaacacccaccggcacacagaccccaaccacgacacccatcaccaccaccactacggtgaccccaaccccaacacccaccggcacacagaccccaaccacgacacccatcaccaccaccactacggtgaccccaaccccaacacccaccggcacacagaccccaaccacgacacccatcaccaccaccactacggtgaccccaaccccaacacccaccggcacacagaccccaaccacgacacccatcaccaccaccactacggtgaccccaaccccaacacccaccggcacacagaccccaaccacgacacccatcaccaccaccactacggtgaccccaaccccaacacccaccggcacacagaccccaaccacgacacccatcaccaccaccactacggtgaccccaaccccaacacccaccggcacacagaccccaaccacgacacccatcaccaccaccactacggtgaccccaaccccaacacccaccggcacacagaccccaaccacgacacccatcaccaccaccactacggtgaccccaaccccaacacccaccggcacacagaccccaaccacgacacccatcaccaccaccactacggtgaccccaaccccaacacccaccggcacacagaccccaaccacgacacccatcaccaccaccactacggtgaccccaaccccaacacccaccggcacacagaccccaaccacgacacccatcaccaccaccactacggtgaccccaaccccaacacccaccggcacacagaccccaaccacgacacccatcaccaccaccactacggtgaccccaaccccaacacccaccggcacacagaccccaaccacgacacccatcaccaccaccactacggtgaccccaaccccaacacccaccggcacacagaccccaaccacgacacccatcaccaccaccactacggtgaccccaaccccaacacccaccggcacacagaccccaaccacgacacccatcaccaccaccactacggtgaccccaaccccaacacccaccggcacacagaccccaaccacgacacccatcaccaccaccactacggtgaccccaaccccaacacccaccggcacacagaccccaaccacgacacccatcaccaccaccactacggtgaccccaaccccaacacccaccggcacacagaccccaaccacgacacccatcaccaccaccactacggtgaccccaaccccaacacccaccggcacacagaccccaaccacgacacccatcaccaccaccactacggtgaccccaaccccaacacccaccggcacacagaccccaaccacgacacccatcaccaccaccactacggtgaccccaaccccaacacccaccggcacacagaccccaaccacgacacccatcaccaccaccactacggtgaccccaaccccaacacccaccggcacacagaccccaaccacgacacccatcaccaccaccactacggtgaccccaaccccaacacccaccggcacacagaccccaaccacgacacccatcaccaccaccactacggtgaccccaaccccaacacccaccggcacacagaccccaaccacgacacccatcaccaccaccactacggtgaccccaaccccaacacccaccggcacacagaccccaaccacgacacccatcaccaccaccactacggtgaccccaaccccaacacccaccggcacacagaccccaaccacgacacccatcaccaccaccactacggtgaccccaaccccaacacccaccggcacacagaccccaaccacgacacccatcaccaccaccactacggtgaccccaaccccaacacccaccggcacacagaccccaaccacgacacccatcaccaccaccactacggtgaccccaaccccaacacccaccggcacacagaccccaaccacgacacccatcaccaccaccactacggtgaccccaaccccaacacccaccggcacacagaccccaaccacgacacccatcaccaccaccactacggtgaccccaaccccaacacccaccggcacacagaccccaaccacgacacccatcaccaccaccactacggtgaccccaaccccaacacccaccggcacacagaccccaaccacgacacccatcaccaccaccactacggtgaccccaaccccaacacccaccggcacacagaccccaaccacgacacccatcaccaccaccactacggtgaccccaaccccaacacccaccggcacacagaccccaaccacgacacccatcaccaccaccactacggtgaccccaaccccaacacccaccggcacacagaccccaaccacgacacccatcaccaccaccactacggtgaccccaaccccaacacccaccggcacacagaccccaaccacgacacccatcaccaccaccactacggtgaccccaaccccaacacccaccggcacacagaccccaaccacgacacccatcaccaccaccactacggtgaccccaaccccaacacccaccggcacacagaccccaaccacgacacccatcaccaccaccactacggtgaccccaaccccaacacccaccggcacacagaccccaaccacgacacccatcaccaccaccactacggtgaccccaaccccaacacccaccggcacacagaccccaaccacgacacccatcaccaccaccactacggtgaccccaaccccaacacccaccggcacacagaccccaaccacgacacccatcaccaccaccactacggtgaccccaaccccaacacccaccggcacacagaccccaaccacgacacccatcaccaccaccactacggtgaccccaaccccaacacccaccggcacacagaccccaaccacgacacccatcaccaccaccactacggtgaccccaaccccaacacccaccggcacacagaccccaaccacgacacccatcaccaccaccactacggtgaccccaaccccaacacccaccggcacacagaccccaaccacgacacccatcaccaccaccactacggtgaccccaaccccaacacccaccggcacacagaccccaaccacgacacccatcaccaccaccactacggtgaccccaaccccaacacccaccggcacacagaccccaaccacgacacccatcaccaccaccactacggtgaccccaaccccaacacccaccggcacacagaccccaaccacgacacccatcaccaccaccactacggtgaccccaaccccaacacccaccggcacacagaccccaaccacgacacccatcaccaccaccactacggtgaccccaaccccaacacccaccggcacacagaccccaaccacgacacccatcaccaccaccactacggtgaccccaaccccaacacccaccggcacacagaccccaaccacgacacccatcaccaccaccactacggtgaccccaaccccaacacccaccggcacacagaccccaaccacgacacccatcaccaccaccactacggtgaccccaaccccaacacccaccggcacacagaccccaaccacgacacccatcaccaccaccactacggtgaccccaaccccaacacccaccggcacacagaccccaaccacgacacccatcaccaccaccactacggtgaccccaaccccaacacccaccggcacacagaccccaaccacgacacccatcaccaccaccactacggtgaccccaaccccaacacccaccggcacacagaccccaaccacgacacccatcaccaccaccactacggtgaccccaaccccaacacccaccggcacacagaccccaaccacgacacccatcaccaccaccactacggtgaccccaaccccaacacccaccggcacacagaccccaaccacgacacccatcaccaccaccactacggtgaccccaaccccaacacccaccggcacacagaccccaaccacgacacccatcaccaccaccactacggtgaccccaaccccaacacccaccggcacacagaccccaaccacgacacccatcaccaccaccactacggtgaccccaaccccaacacccaccggcacacagaccccaaccacgacacccatcaccaccaccactacggtgaccccaaccccaacacccaccggcacacagaccccaaccacgacacccatcaccaccaccactacggtgaccccaaccccaacacccaccggcacacagaccccaaccacgacacccatcaccaccaccactacggtgaccccaaccccaacacccaccggcacacagaccccaaccacgacacccatcaccaccaccactacggtgaccccaaccccaacacccaccggcacacagaccccaaccacgacacccatcaccaccaccactacggtgaccccaaccccaacacccaccggcacacagaccccaaccacgacacccatcaccaccaccactacggtgaccccaaccccaacacccaccggcacacagaccgggccccccacccacacaagcacagcaccgattgctgagttgaccacatccaatcctccgcctgagtcctcaacccctcagacctctcggtccacctcttcccctctcacggagtcaaccacccttctgagtaccctaccacctgccattgagatgaccagcacggccccaccctccacacccacggcacccacgaccacgagcggaggccacacactgtctccaccgcccagcaccaccacgtcccctccaggcacccccactcgcggtaccacgaccgggtcatcttcagcccccacccccagcactgtgcagacgaccaccaccagtgcctggaccccaacgccgaccccactctccacacccagcatcatcaggaccacaggcctgaggccctacccttcctctgtgcttatctgctgtgtcctgaacgacacctactacgcaccaggtgaggaggtgtacaacggcacatacggagacacctgttatttcgtcaactgctcactgagctgtacgttggagttctataactggtcctgcccatccacgccctccccaacacccacgccctccaagtcgacgcccacgccttccaagccatcgtccacgccctccaagccgacgcccggcaccaagccccccgagtgcccagactttgatcctcccagacaggagaacgagacttggtggctgtgcgactgcttcatggccacgtgcaagtacaacaacacggtggagatcgtgaaggtggagtgtgagccgccgcccatgcccacctgctccaacggcctccaacccgtgcgcgtcgaggaccccgacggctgctgctggcactgggagtgcgactgctactgcacgggctggggcgacccgcactatgtcaccttcgacggactctactacagctaccagggcaactgcacctacgtgctggtggaggagatcagcccctccgtggacaacttcggagtttacatcgacaactaccactgcgatcccaacgacaaggtgtcctgtccccgcaccctcatcgtgcgccacgagacccaggaggtgctgatcaagaccgtgcatatgatgcccatgcaggtgcaggtgcaggtgaacaggcaggcggtggcactgccctacaagaagtacgggctggaggtgtaccagtctggcatcaactacgtggtggacatccccgagctgggtgtcctcgtctcctacaatggcctgtccttctccgtcaggctgccctaccaccggtttggcaacaacaccaagggccagtgtggcacctgcaccaacaccacctccgacgactgcattctgcccagcggggagatcgtctccaactgtgaggctgcggctgaccagtggctggtgaacgacccctccaagccacactgcccccacagcagctccacgaccaagcgcccggccgtcactgtgcccgggggcggtaaaacgaccccacacaaggactgcaccccatctcccctctgccagctcatcaaggacagcctgtttgcccagtgccacgcactggtgcccccgcagcactactacgatgcctgcgtgttcgacagctgcttcatgccgggctcgagcctggagtgcgccagtctgcaggcctacgcagccctctgtgcccagcagaacatctgcctcgactggcggaaccacacgcatggggcctgcttggtggagtgcccatctcacagggagtaccaggcctgtggccctgcagaagagcccacgtgcaaatccagctcctcccagcagaacaacacagtcctggtggaaggctgcttctgtcctgagggcaccatgaactacgctcctggctttgatgtctgcgtgaagacctgcggctgtgtgggacctgacaatgtgcccagagagtttggggagcacttcgagttcgactgcaagaactgtgtctgcctggagggtggaagtggcatcatctgccaacccaagaggtgcagccagaagcccgttacccactgcgtggaagacggcacctacctcgccacggaggtcaaccctgccgacacctgctgcaacattaccgtctgcaagtgcaacaccagcctgtgcaaagagaagccctccgtgtgcccgctgggattcgaagtgaagagcaagatggtgcctggaaggtgctgtcccttctactggtgtgagtccaagggggtgtgtgttcacgggaatgctgagtaccagcccggttctccagtttattcctccaagtgccaggactgcgtgtgcacggacaaggtggacaacaacaccctgctcaacgtcatcgcctgcacccacgtgccctgcaacacctcctgcagccctggcttcgaactcatggaggcccccggggagtgctgtaagaagtgtgaacagacgcactgtatcatcaaacggcccgacaaccagcacgtcatcctgaagcccggggacttcaagagcgacccgaagaacaactgcacattcttcagctgcgtgaagatccacaaccagctcatctcgtccgtctccaacatcacctgccccaactttgatgccagcatttgcatcccgggctccatcacattcatgcccaatggatgctgcaagacctgcacccctcgcaatgagaccagggtgccctgctccaccgtccccgtcaccacggaggtttcgtacgccggctgcaccaagaccgtcctcatgaatcattgctccgggtcctgcgggacatttgtcatgtactcggccaaggcccaggccctggaccacagctgctcctgctgcaaagaggagaaaaccagccagcgtgaggtggtcctgagctgccccaatggcggctcgctgacacacacctacacccacatcgagagctgccagtgccaggacaccgtctgcgggctccccaccggcacctcccgccgggcccggcgctcccctaggcatctggggagcgggtgagcggggtgggcacagcccccttcactgccctcgacagctttacctcccccggaccctctgagcctcctaagctcggcttcctctcttcagatatttattgtctgagtctttgttcagtccttgctttccaataataaactcagggggacatgc

SEQ ID NO: 55 - DNA, 4707 bp, Homo sapiens
gatcaccatcaccgagaccacctcacacagtactcccagctacactacctcaatcaccaccaccgagaccccctcacacagtactcccagctacactacctcaatcaccaccaccgagaccccatcacacagtactcccagcttcacttcttcaatcaccaccaccgagaccacatcccacagtactcccagcttcacttcttcaatcaggaccaccgagaccacatcctacagtactcccagcttcacttcttcaaataccatcactgagaccacctcacacagtactcccagctacattacctcaatcaccaccaccgagaccccctcaagcagtactcccagcttcagttcttcgatcaccaccactgagaccacatcccacagtactcccggcttcacttcttcaatcaccaccactgagactacatcccacagtactcccagcttcacttcttcgatcaccaccactgagaccacctcacatgatactcccagcttcacttcttcaatcaccaccagtgagaccccctcacacagtactcccagctccacttctttaatcaccaccaccaagaccacctcacacagtactcccagcttcacttcttcgatcaccaccaccgagaccacctcacacagtgctcgcagcttcacttcttcgatcaccaccaccgagaccacctcacacaatactcggagcttcacttcttcgatcaccaccaccgagaccaactctcacagtactaccagcttcacttcttcgatcaccaccaccgagaccacctcacacagtactcccagcttcagttcttcaatcaccaccactgagacccccttacacagtactcctggcctaccttcgtgggtcaccaccaccaagaccacctcacacattactcctggcctcacttcttcaatcaccaccactgagactacctcacacagtactcccggcttcacttcttcaatcaccaccactgagaccacctcagagagtactcccagcctcagttcttcaaccatctactccacagtcagcacatccacaactgccatcacctcacattttactacctcagagactgcggtgactcccacacctgtaaccccatcttctctgagtacagacatcccgaccacaagcctacgaactctcaccccttcgtctgtgggcaccagcacttcattgactacaaccacagactttccctctatacccactgatatcagtaccttaccaactcgaacacacatcatttcatcttctccctccatccaaagtacagaaacctcatcccttgtgggcaccacctctcccaccatgtccactgtgagaatgaccctcagaattactgagaacaccccaatcagttcctttagcacaagtattgttgttatacctgaaaccccaacacagacccctcctgtactgacgtcagccactgggacccaaacatctcctgcacctactactgtcacctttggaagtacggattcctccacgtccactcttcatactcttactccatcaacagccttgagcacgatcgtgtcaacatcacaggttcctattcctagcacacattcctccacccttcaaacaactccttctactccctcattgcaaacttcactcacatctacaagtgagttcactacagaatctttcactaggggaagtacgtctacaaatgcaatcttgacttcttttagtaccatcatctggtcctcaacacccactattatcatgtcctcttctccatcttctgccagcataactccagtgttctccactaccattcattctgttccttcttcaccatacattttcagtacagaaaatgtgggctccgcttctatcacaggctttcctagtctctcttcctctgcaactaccagcacttcttcaaccagctcctctctgaccacagctctcactgaaataacccccttttcttatatttcccttccctccaccacaccctgtccaggaactataacaattaccatagtccctgcctctcccactgatccatgtgttgaaatggatcccagcactgaagctacttctcctcccaccaccccattaacagtctttccctttactaccgaaatggtcacctgtcctacctccatcagtatccaaactactcttactacatatatggacacttcttccatgatgccagaaagtgagtccagcatctcacccaatgcttccagttccactggcactgggactgtacccacaaacacagttttcacaagtactcgactgcccaccagtgagacctggctgagcaacagttctgtgatccccctacctcttcctggcgtctctaccatcccgctcaccatgaaaccaagcagtagcctcccgaccatcctgaggacttcaagcaagtcaacacacccatccccacccaccactaggacttcagagacaccagtggccactacccagactcctaccacccttacatcacgcaggacaactcgcatcacttctcagatgaccacacagtccacgttgaccaccactgcaggcacctgtgacaatggtggcacctgggaacagggccagtgtgcttgccttccggggttttctggggaccgctgtcagctccagaccagatgccagaatgggggtcagtgggatggcctcaaatgccagtgccccagcaccttctatggttccagttgtgagtttgctgtggaacaggtggatctagatgcagaagatttttgcagacatgcagggcttcaccttcaagggtgtggagatcctgtccctgaggaatggcagcatcgtggtggactacctggtcctgctggagatgcccttcagcccccagctggagagcgagtatgagcaggtgaagaccacgctgaaggaggggctgcagaacgccagccaggatgtgaacagctgccaggactcccagaccctgtgttttaagcctgactccatcaaggtgaacaacaacagcaagacagagctgaccccggcagccatctgccgcgcgccgctcccacgggctatgaagagttctacttccccttggtggaggccacccggctccgctgtgtcaccaaatgcacgtctggggtggacaacgccatcgactgtcaccagggccagtgcgttctggagacgagcggtcccacgtgtcgctgctactccaccgacacgcactggttctctggcccgcgctgcgaggtggccgtccactggagggcgctggtcggggcctgacggccggcgcgcgctgctggtgctgctgctcgtggcgctgggcgtccgggcggtgcgctccggatggtggggcggccagcgccgaggccggtcctgggaccaggacaggaaatggttcgagacctgggatgaggaagtcgtgggcactttttcaaactggggtttcgaggacgacggaacagacaaggatacaaatttctatgtggccttggagaacgtgacaccactatgaaggtgcacatcaagagacccgagatgacctcgtcctcagtgtgagcctgcggggccccttcaccaccccctccgccctgccccggacacaagggtctgcattgcgtccatttcaagaggtgaccccaggacgcgggcagcccaggctcctgctgttcttgggcaagatgagactgttcccccaaatcccatccttctccttccaacttggctgaaacccacctggagacgcagttcacgtccaggctcttccactgtggaatcttgggcaagtcagtaacgagcctcagtttcctcacctgcaaaacgggtacagcattcctgtatgatacgtcacgccgttgttgtgaaaaccacatagacttggtcaattctcggtcctactctgccctcccgtctcagccctcgtgttgccattgcctctctcggatcctccaatcctcacgtccttcacctggtctctggccctggttcttattttctctcaattccctactgcctgtttcttactttgaacctggaggcagcctgcagccccatcccatctcctgccctctcctgatctaactccctgctgcatctcttgctcccattccttagacgtcctccccttttgaccccgttccttcatccatcctgcaccccagtcccccagccctaaatcctccctcctctcctcacatcctggcccctagcaaggtatagatagcctctgtgtcttaggataccccgggtgctgttccctcggtcatcctgttgcccagttccccgtttctcttgctctcattcctgtatcctttccccttttgagcccgtccattcatcggttctgcccccgactcccccagccctaaataccccagctgctgttccccccatcaccctgctgcccaattctttattctccacccctttctctcacccctggagccctgcgggtgggggcagggcatgagttccccagtccccaaggaaaggcagccccctcagtctccctcctcctcattcccttccatctccctcccctctgccttttaaacccatcccctccgattcccctcctcccccctctctccctggtgtcacctggattcctgcagtaattctgagcccttgaaatcctcagtcgccttggcggggaagattggctttggggacaggaggtcggcacatctccaggtcttcatgtgcgcaatatagagtttattgtaaaaagc

SEQ ID NO: 56 - DNA, 4151 bp, Homo sapiens
gggacagggcactcttccccgccgtccacacaatgagtgttggccggaggaagctggccctgctctgggccctggctctcgctctggcctgcacccggcatacaggccatgcccaggatggctcctccgaatccagctacaagcaccaccctgccctctctcctatcgcccgggggcccatcggggtcccgctccgtggggcgactgtcttcccatctctgaggaccatccctgtggtacgagcctccaacccggcgcacaacgggcgggtgtgcagcacctggggcagcttccactacaagaccttcgacggcgacgtcttccgcttccccggcctctgcaactacgtgttctccgagcactgcggtgccgcctacgaggattttaacatcccagctacgccgcagccaggagtcagcggcccccacgctgagcagggtcctcatgaaggtggatggcgtggtcatccagctgaccaagggctccgtcctggtcaacggccacccggtcctgctgcccttcagccagtctggggtcctcattcagcaagagcagcagctacaccaaggtggaagccaggctgggccttgtcctcatgtggaaccacgatgacagcctgctgctggaagctggacaccaaatacgccaacaagaacctgtgggctctgtggggacttcaacgggatgcccgtggtcagcgagctcctctcccacaacaccaagctgacacccatggaattcgggaacctgccgaaagatggacgaacccacggagcagtgtcaggaccctgtccctgaacccccgaagaactgctccactggctttggcatcctgtgaggagctcctgcacggccagctgttctctggctgcgtggccctggtggacgtcggcagctacctggaggcttgcaggcaagacctctgcttctgtgaagacaccgacctgctcagctgcgtctgccacacccttgccgagtactcccggcagtgcacccatgcaggggggttgccccaggactggcggggccctgacttctgcccccagaagtgccccaacaacatgcagtaccacgagtgccgctccccctgcgcagacacctgctccaaccaggagcactcccgggcctgtgaggaccactgtgtggccggctgcttctgccctgaggggacggtgcttgacgacatcggccagaccggctgtgtccctgtgtcaaagtgtgcctgcgtctacaacggggctgcctatgccccaggggccacctactccacagactgcaccaactgcacctgctccggaggccggtggagctgccaggaagttccatgcccgggtacctgctctgtgcttggaggtgcccacttctcaacgtttgacgggaagcaatacacggtgcacggcgactgcagctatgtgctgaccaagccctgtgacagcagtgccttcactgtactggctgagctgcgcaggtgcgggctgacggacagcgagacctgcctgaagagcgtgacactgagcctggatggggcgcagacggtggtggtgatcaaggccagtggggaagtgttcctgaaccagatctacacccagctgcccatctctgcagccaacgtcaccatcttcagaccctcaaccttcttcatcatcgcccagaccagcctgggcctgcagctgaacctgcagctggtgcccaccatgcagctgttcatgcagctggcgcccaagctccgtgggcagacctgcggtctctgtgggaacttcaacagcatccaggccgatgacttccggaccctcagtggggtggtggaggccaccgctgcggccttcttcaacaccttcaagacccaggccgcctgccccaacatcaggaacagcttcgaggacccctgctctctgagcgtggagaatgagaagtatgctcagcactggtgctcgcagctgaccgatgccgacggccccttcggccggtgccatgctgccgtgaagccgggaacctactactcgaactgcatgtttgacacctgcaactgtgagcggagcgaggactgcctgtgcgccgcgctgtcctcctacgtgcacgcctgtgccgccaagggcgtgcagctcggcggctggagggacggcgtctgcacgaagcctatgaccacttgccccaagtcaatgacgtaccactaccatgtcagcacctgccagcccacctgccgctccctgagcgagggggacatcacctgcagtgttggcttcatccccgtggatggctgcatctgtcccaagggcaccttcctggacgacacgggcaagtgtgtgcaggccagcaactgtccctgctaccacagaggctccatgatccccaatggggagtcggtgcacgacagcggggctatctgcacctgcacacatgggaagctgagctgcatcggaggccaagcccccgccccagtgtgtgctgcgcccatggtgttctttgactgccgaaatgccacgcccggggacacaggggctggctgtcagaagagctgccacacactggacatgacctgttacagcccccaatgtgtgcctggctgcgtgtgccccgacgggctggtggcggacggcgagggcggctgcatcactgcggaggactgcccctgcgtgcacaatgaggccagctaccgggccggccagaccatccgggtgggctgcaacacctgcacctgtgacagcaggatgtggcggtgcacagatgacccctgcctggccacctgcgccgtgtacggggacggccactacctcaccttcgacggacagagctacagcttcaacgaggagactgcgagtactcgctggtgcagaaccgctgtggcgggaaagacagcacccaggactcctttcgtgttgtcaccgagaacgtcccctgcggcaccacagggaccacctgctccaaggccatcaagattttcctgggggaacttcgagctgaagctaagccatgggaaggtggaggtgatcgggacggacgagagccaggaggtgccatacaccatccggcagatgggcatctacctggtggtggacaccgacattggcctggtgctgctgtgggacaagaagaccagcatcttcatcaacctcagccccgagttcaagggcagggtctgcggcctgtgtgggaacttcgacgacatcgccgttaatgactttgccacgcggagccggtctgtggtgggggacgtgctggagtttgggaacagctggaagctctccccctcctgcccagatgccctggcgcccaaggacccctgcacggccaaccccttccgcaagtcctgggcccagaagcagtgcagcatcctccacggccccaccttcgccgcctgccacgcacacgtggagccggccaggtactacgaggcctgcgtgaacgacgcgtgcgcctgcgactccgggggtgactgcgagtgcttctgcacggctgtggcccgctacgcccaggcctgccatgaagtaggcacctgtgtgtgtctgcggaccccaagcatctgccctctgttctgcgactactacaaccccgaaggccagtgcgagtggcactaccagccctgcggggtgccctgcctgcgcacctgccggaacccccgtggagactgcctgcgggacgtccggggcctggaaggctgctaccccaagtgcccaccagaggctcccatctttgatgaggacaagatgcagtgtgtggccacctgcccaaccccgcctctgccaccacggtgccacgtccatgggaagtcctaccggccaggtgcagtggtgccctcggacaagaactgccagtcctgcctttgtacggagcgcggcgtggagtgcacctacaaagctgaggcctgtgtctgcacctacaatggacagcgcttccacccaggggacgtcatctaccacacgacggatggcacgggtggctgcatctccgcccgctgcggggccaacggcaccattgagaggagggtctacccctgcagccccaccacccctgtccccccaaccaccttctccttctccacacccccgcttgtcgtgagctccacgcacacccccagcaatggcccaagcagcgcgcacacaggccctccgagcagcgcctggcccaccacagcaggcacttctcccaggacg

SEQ ID NO: 57 - DNA, 880 bp, Homo sapiens
tccagcactttgctcgggtcacggcctcctcctggctcccaggaccccaccataggcagaggcaggccttcctacaccctactccctgtgcctccaggctcgactagtccctagcactcgacgactgagtctctgagatcacttcaccgtggtctccgcctcacccttggcgctggaccagtgagaggagagggctggggcgctccgctgagccactcctgcgcccccctggccttgtctacctcttgccccccgaagggttagtgtcgagctcaccccagcatcctacaacctcctggtggccttgccgcccccacaaccccgaggtataaagccaggtacacgaggcaggggacgcaccaaggatggagatgttccaggggctgctgctgttgctgctgctgagcatgggcgggacatgggcatccaaggagccgcttcggccacggtgccgccccatcaatgccaccctggctgtggagaaggagggctgccccgtgtgcatcaccgtcaacaccaccatctgtgccggctactgccccaccatgacccgcgtgctgcagggggtcctgccggccctgcctcaggtggtgtgcaactaccgcgatgtgcgcttcgagtccatccggctccctggctgcccgcgcggcgtgaaccccgtggtctcctacgccgtggctctcagctgtcaatgtgcactctgccgccgcagcaccactgactgcgggggtcccaaggaccaccccttgacctgtgatgacccccgcttccaggactcctcttcctcaaaggcccctccccccagccttccaagtccatcccgactcccggggccctcggacaccccgatcctcccacaataaaggcttctcaatccgca

SEQ ID NO: 58 - DNA, 5532 bp, Homo sapiens
gccgcgctgcgccggagtcccgagctagccccggcgccgccgccgcccagaccggacgacaggccacctcgtcggcgtccgcccgagtccccgcctcgccgccaacgccacaaccaccgcgcacggccccctgactccgtccagtattgatcgggagagccggagcgagctcttcggggagcagcgatgcgaccctccgggacggccggggcagcgctcctggcgctgctggctgcgctctgcccggcgagtcgggctctggaggaaaagaaagtttgccaaggcacgagtaacaagctcacgcagttgggcacttttgaagatcattttctcagcctccagaggatgttcaataactgtgaggtggtccttgggaatttggaaattacctatgtgcagaggaattatgatctttccttcttaaagaccatccaggaggtggctggttatgtcctcattgccctcaacacagtggagcgaattcctttggaaaacctgcagatcatcagaggaaatatgtactacgaaaattcctatgccttagcagtcttatctaactatgatgcaaataaaaccggactgaaggagctgcccatgagaaatttacaggaaatcctgcatggcgccgtgcggttcagcaacaaccctgccctgtgcaacgtggagagcatccagtggcgggacatagtcagcagtgactttctcagcaacatgtcgatggacttccagaaccacctgggcagctgccaaaagtgtgatccaagctgtcccaatgggagctgctggggtgcaggagaggagaactgccagaaactgaccaaaatcatctgtgcccagcagtgctccgggcgctgccgtggcaagtcccccagtgactgctgccacaaccagtgtgctgcaggctgcacaggcccccgggagagcgactgcctggtctgccgcaaattccgagacgaagccacgtgcaaggacacctgccccccactcatgctctacaaccccaccacgtaccagatggatgtgaaccccgagggcaaatacagctttggtgccacctgcgtgaagaagtgtccccgtaattatgtggtgacagatcacggctcgtgcgtccgagcctgtggggccgacagctatgagatggaggaagacggcgtccgcaagtgtaagaagtgcgaagggccttgccgcaaagtgtgtaacggaataggtattggtgaatttaaagactcactctccataaatgctacgaatattaaacacttcaaaaactgcacctccatcagtggcgatctccacatcctgccggtggcatttaggggtgactccttcacacatactcctcctctggatccacaggaactggatattctgaaaaccgtaaaggaaatcacagggtttttgctgattcaggcttggcctgaaaacaggacggacctccatgcctttgagaacctagaaatcatacgcggcaggaccaagcaacatggtcagttttctcttgcagtcgtcagcctgaacataacatccttgggattacgctccctcaaggagataagtgatggagatgtgataatttcaggaaacaaaaatttgtgctatgcaaatacaataaactggaaaaaactgtttgggacctccggtcagaaaaccaaaattataagcaacagaggtgaaaacagctgcaaggccacaggccaggtctgccatgccttgtgctcccccgagggctgctggggcccggagcccagggactgcgtctcttgccggaatgtcagccgaggcagggaatgcgtggacaagtgcaagcttctggagggtgagccaagggagtttgtggagaactctgagtgcatacagtgccacccagagtgcctgcctcaggccatgaacatcacctgcacaggacggggaccagacaactgtatccagtgtgcccactacattgacggcccccactgcgtcaagacctgcccggcaggagtcatgggagaaaacaacaccctggtctggaagtacgcagacgccggccatgtgtgccacctgtgccatccaaactgcacctacggatgcactgggccaggtcttgaaggctgtccaacgaatgggcctaagatcccgtccatcgccactgggatggtgggggccctcctcttgctgctggtggtggccctggggatcggcctcttcatgcgaaggcgccacatcgttcggaagcgcacgctgcggaggctgctgcaggagagggagcttgtggagcctcttacacccagtggagaagctcccaaccaagctctcttgaggatcttgaaggaaactgaattcaaaaagatcaaagtgctgggctccggtgcgttcggcacggtgtataagggactctggatcccagaaggtgagaaagttaaaattcccgtcgctatcaaggaattaagagaagcaacatctccgaaagccaacaaggaaatcctcgatgaagcctacgtgatggccagcgtggacaacccccacgtgtgccgcctgctgggcatctgcctcacctccaccgtgcaactcatcacgcagctcatgcccttcggctgcctcctggactatgtccgggaacacaaagacaatattggctcccagtacctgctcaactggtgtgtgcagatcgcaaagggcatgaactacttggaggaccgtcgcttggtgcaccgcgacctggcagccaggaacgtactggtgaaaacaccgcagcatgtcaagatcacagattttgggctggccaaactgctgggtgcggaagagaaagaataccatgcagaaggaggcaaagtgcctatcaagtggatggcattggaatcaattttacacagaatctatacccaccagagtgatgtctggagctacggggtgaccgtttgggagttgatgacctttggatccaagccatatgacggaatccctgccagcgagatctcctccatcctggagaaaggagaacgcctccctcagccacccatatgtaccatcgatgtctacatgatcatggtcaagtgctggatgatagacgcagatagtcgcccaaagttccgtgagttgatcatcgaattctccaaaatggcccgagacccccagcgctaccttgtcattcagggggatgaaagaatgcatttgccaagtcctacagactccaacttctaccgtgccctgatggatgaagaagacatggacgacgtggtggatgccgacgagtacctcatcccacagcagggcttcttcagcagcccctccacgtcacggactcccctcctgagctctctgagtgcaaccagcaacaattccaccgtggcttgcattgatagaaatgggctgcaaagctgtcccatcaaggaagacagcttcttgcagcgatacagctcagaccccacaggcgccttgactgaggacagcatagacgacaccttcctcccagtgcctgaatacataaaccagtccgttcccaaaaggcccgctggctctgtgcagaatcctgtctatcacaatcagcctctgaaccccgcgcccagcagagacccacactaccaggacccccacagcactgcagtgggcaaccccgagtatctcaacactgtccagcccacctgtgtcaacagcacattcgacagccctgcccactgggcccagaaaggcagccaccaaattagcctggacaaccctgactaccagcaggacttctttcccaaggaagccaagccaaatggcatctttaagggctccacagctgaaaatgcagaatacctaagggtcgcgccacaaagcagtgaatttattggagcatgaccacggaggatagtatgagccctaaaaatccagactctttcgatacccaggaccaagccacagcaggtcctccatcccaacagccatgcccgcattagctcttagacccacagactggttttgcaacgtttacaccgactagccaggaagtacttccacctcgggcacattttgggaagttgcattcctttgtcttcaaactgtgaagcatttacagaaacgcatccagcaagaatattgtccctttgagcagaaatttatctttcaaagaggtatatttgaaaaaaaaaaaaaaagtatatgtgaggatttttattgattggggatcttggagtttttcattgtcgctattgatttttacttcaatgggctcttccaacaaggaagaagcttgctggtagcacttgctaccctgagttcatccaggcccaactgtgagcaaggagcacaagccacaagtcttccagaggatgcttgattccagtggttctgcttcaaggcttccactgcaaaacactaaagatccaagaaggccttcatggccccagcaggccggatcggtactgtatcaagtcatggcaggtacagtaggataagccactctgtcccttcctgggcaaagaagaaacggaggggatgaattcttccttagacttacttttgtaaaaatgtccccacggtacttactccccactgatggaccagtggtttccagtcatgagcgttagactgacttgtttgtcttccattccattgttttgaaactcagtatgccgcccctgtcttgctgtcatgaaatcagcaagagaggatgacacatcaaataataactcggattccagcccacattggattcatcagcatttggaccaatagcccacagctgagaatgtggaatacctaaggataacaccgcttttgttctcgcaaaaacgtatctcctaatttgaggctcagatgaaatgcatcaggtcctttggggcatagatcagaagactacaaaaatgaagctgctctgaaatctcctttagccatcaccccaaccccccaaaattagtttgtgttacttatggaagatagttttctccttttacttcacttcaaaagctttttactcaaagagtatatgttccctccaggtcagctgcccccaaaccccctccttacgctttgtcacacaaaaagtgtctctgccttgagtcatctattcaagcacttacagctctggccacaacagggcattttacaggtgcgaatgacagtagcattatgagtagtgtgaattcaggtagtaaatatgaaactagggtttgaaattgataatgctttcacaacatttgcagatgttttagaaggaaaaaagttccttcctaaaataatttctctacaattggaagattggaagattcagctagttaggagcccattttttcctaatctgtgtgtgccctgtaacctgactggttaacagcagtcctttgtaaacagtgttttaaactctcctagtcaatatccaccccatccaatttatcaaggaagaaatggttcagaaaatattttcagcctacagttatgttcagtcacacacacatacaaaatgttccttttgcttttaaagtaatttttgactcccagatcagtcagagcccctacagcattgttaagaaagtatttgatttttgtctcaatgaaaataaaactatattcatttcc

SEQ ID NO: 59 - DNA, 4530 bp, Homo sapiens
aattctcgagctcgtcgaccggtcgacgagctcgagggtcgacgagctcgagggcgcgcgcccggcccccacccctcgcagcaccccgcgccccgcgccctcccagccgggtccagccggagccatggggccggagccgcagtgagcaccatggagctggcggccttgtgccgctgggggctcctcctcgccctcttgccccccggagccgcgagcacccaagtgtgcaccggcacagacatgaagctgcggctccctgccagtcccgagacccacctggacatgctccgccacctctaccagggctgccaggtggtgcagggaaacctggaactcacctacctgcccaccaatgccagcctgtccttcctgcaggatatccaggaggtgcagggctacgtgctcatcgctcacaaccaagtgaggcaggtcccactgcagaggctgcggattgtgcgaggcacccagctctttgaggacaactatgccctggccgtgctagacaatggagacccgctgaacaataccacccctgtcacaggggcctccccaggaggcctgcgggagctgcagcttcgaagcctcacagagatcttgaaaggaggggtcttgatccagcggaacccccagctctgctaccaggacacgattttgtggaaggacatcttccacaagaacaaccagctggctctcacactgatagacaccaaccgctctcgggcctgccacccctgttctccgatgtgtaagggctcccgctgctggggagagagttctgaggattgtcagagcctgacgcgcactgtctgtgccggtggctgtgcccgctgcaaggggccactgcccactgactgctgccatgagcagtgtgctgccggctgcacgggccccaagcactctgactgcctggcctgcctccacttcaaccacagtggcatctgtgagctgcactgcccagccctggtcacctacaacacagacacgtttgagtccatgcccaatcccgagggccggtatacattcggcgccagctgtgtgactgcctgtccctacaactacctttctacggacgtgggatcctgcaccctcgtctgccccctgcacaaccaagaggtgacagcagaggatggaacacagcggtgtgagaagtgcagcaagccctgtgcccgagtgtgctatggtctgggcatggagcacttgcgagaggtgagggcagttaccagtgccaatatccaggagtttgctggctgcaagaagatctttgggagcctggcatttctgccggagagctttgatggggacccagcctccaacactgccccgctccagccagagcagctccaagtgtttgagactctggaagagatcacaggttacctatacatctcagcatggccggacagcctgcctgacctcagcgtcttccagaacctgcaagtaatccggggacgaattctgcacaatggcgcctactcgctgaccctgcaagggctgggcatcagctggctggggctgcgctcactgagggaactgggcagtggactggccctcatccaccataacacccacctctgcttcgtgcacacggtgccctgggaccagctctttcggaacccgcaccaagctctgctccacactgccaaccggccagaggacgagtgtgtgggcgagggcctggcctgccaccagctgtgcgcccgagggcactgctggggtccagggcccacccagtgtgtcaactgcagccagttccttcggggccaggagtgcgtggaggaatgccgagtactgcaggggctccccagggagtatgtgaatgccaggcactgtttgccgtgccaccctgagtgtcagccccagaatggctcagtgacctgttttggaccggaggctgaccagtgtgtggcctgtgcccactataaggaccctcccttctgcgtggcccgctgccccagcggtgtgaaacctgacctctcctacatgcccatctggaagtttccagatgaggagggcgcatgccagccttgccccatcaactgcacccactcctgtgtggacctggatgacaagggctgccccgccgagcagagagccagccctctgacgtccatcgtctctgcggtggttggcattctgctggtcgtggtcttgggggtggtctttgggatcctcatcaagcgacggcagcagaagatccggaagtacacgatgcggagactgctgcaggaaacggagctggtggagccgctgacacctagcggagcgatgcccaaccaggcgcagatgcggatcctgaaagagacggagctgaggaaggtgaaggtgcttggatctggcgcttttggcacagtctacaagggcatctggatccctgatggggagaatgtgaaaattccagtggccatcaaagtgttgagggaaaacacatcccccaaagccaacaaagaaatcttagacgaagcatacgtgatggctggtgtgggctccccatatgtctcccgccttctgggcatctgcctgacatccacggtgcagctggtgacacagcttatgccctatggctgcctcttagaccatgtccgggaaaaccgcggacgcctgggctcccaggacctgctgaactggtgtatgcagattgccaaggggatgagctacctggaggatgtgcggctcgtacacagggacttggccgctcggaacgtgctggtcaagagtcccaaccatgtcaaaattacagacttcgggctggctcggctgctggacattgacgagacagagtaccatgcagatgggggcaaggtgcccatcaagtggatggcgctggagtccattctccgccggcggttcacccaccagagtgatgtgtggagttatggtgtgactgtgtgggagctgatgacttttggggccaaaccttacgatgggatcccagcccgggagatccctgacctgctggaaaagggggagcggctgccccagccccccatctgcaccattgatgtctacatgatcatggtcaaatgttggatgattgactctgaatgtcggccaagattccgggagttggtgtctgaattctcccgcatggccagggacccccagcgctttgtggtcatccagaatgaggacttgggcccagccagtcccttggacagcaccttctaccgctcactgctggaggacgatgacatgggggacctggtggatgctgaggagtatctggtaccccagcagggcttcttctgtccagaccctgccccgggcgctgggggcatggtccaccacaggcaccgcagctcatctaccaggagtggcggtggggacctgacactagggctggagccctctgaagaggaggcccccaggtctccactggcaccctccgaaggggctggctccgatgtatttgatggtgacctgggaatgggggcagccaaggggctgcaaagcctccccacacatgaccccagccctctacagcggtacagtgaggaccccacagtacccctgccctctgagactgatggctacgttgcccccctgacctgcagcccccagcctgaatatgtgaaccagccagatgttcggccccagcccccttcgccccgagagggccctctgcctgctgcccgacctgctggtgccactctggaaagggccaagactctctccccagggaagaatggggtcgtcaaagacgtttttgcctttgggggtgccgtggagaaccccgagtacttgacaccccagggaggagctgcccctcagccccaccctcctcctgccttcagcccagccttcgacaacctctattactgggaccaggacccaccagagcggggggctccacccagcaccttcaaagggacacctacggcagagaacccagagtacctgggtctggacgtgccagtgtgaaccagaaggccaagtccgcagaagccctgatgtgtcctcagggagcagggaaggcctgacttctgctggcatcaagaggtgggagggccctccgaccacttccaggggaacctgccatgccaggaacctgtcctaaggaaccttccttcctgcttgagttcccagatggctggaaggggtccagcctcgttggaagaggaacagcactggggagtctttgtggattctgaggccctgcccaatgagactctagggtccagtggatgccacagcccagcttggccctttccttccagatcctgggtactgaaagccttagggaagctggcctgagaggggaagcggccctaagggagtgtctaagaacaaaagcgacccattcagagactgtccctgaaacctagtactgccccccatgaggaaggaacagcaatggtgtcagtatccaggctttgtacagagtgcttttctgtttagtttttactttttttgttttgtttttttaaagacgaaataaagacccaggggagaatgggtgttgtatggggaggcaagtgtggggggtccttctccacacccactttgtccatttgcaaatatattttggaaaac

SEQ ID NO: 60 - DNA, 801 bp, Homo sapiens
caccgcaccctcggactgccccaaggcccccgccgccgctccagcgccgcgcagccaccgccgccgccgccgcctctccttagtcgccgccatgacgaccgcgtccacctcgcaggtgcgccagaactaccaccaggactcagaggccgccatcaaccgccagatcaacctggagctctacgcctcctacgtttacctgtccatgtcttactactttgaccgcgatgatgtggctttgaagaactttgccaaatactttcttcaccaatctcatgaggagagggaacatgctgagaaactgatgaagctgcagaaccaacgaggtggccgaatcttccttcaggatatcaagaaaccagactgtgatgactgggagagcgggctgaatgcaatggagtgtgcattacatttggaaaaaaatgtgaatcagtcactactggaactgcacaaactggccactgacaaaaatgacccccatttgtgtgacttcattgagacacattacctgaatgagcaggtgaaagccatcaaagaattgggtgaccacgtgaccaacttgcgcaagatgggagcgcccgaatctggcttggcggaatatctctttgacaagcacacctgggagacagtgataatgaaagctaagcctcgggctaatttcccatagccgtggggtgacttcctggtcaccaaggcagtgcatgcatgttggggtttcctttaccttttctataagttgtaccaaaacatccacttaagttctttgatttgtaccattccttcaaataaagaaatttggtaccc

SEQ ID NO: 61 - DNA, 878 bp, Homo sapiens
gtcccgcgggtctgtctcttgcttcaacagtgtttggacggaacagatccggggactctcttccagcctccgaccgccctccgatttcctctccgcttgcaacctccgggaccatcttctcggccatctcctgcttctgggacctgccagcaccgtttttgtggttagctccttcttgccaaccaaccatgagctcccagattcgtcagaattattccaccgacgtggaggcagccgtcaacagcctggtcaatttgtacctgcaggcctcctacacctacctctctctgggcttctatttcgaccgcgatgatgtggctctggaaggcgtgagccacttcttccgcgaattggccgaggagaagcgcgagggctacgagcgtctcctgaagatgcaaaaccagcgtggcggccgcgctctcttccaggacatcaagaagccagctgaagatgagtggggtaaaaccccagacgccatgaaagctgccatggccctggagaaaaagctgaaccaggcccttttggatcttcatgccctgggttctgcccgcacggacccccatctctgtgacttcctggagactcacttcctagatgaggaagtgaagcttatcaagaagatgggtgaccacctgaccaacctccacaggctgggtggcccggaggctgggctgggcgagtatctcttcgaaaggctcactctcaagcacgactaagagccttctgagcccagcgacttctgaagggccccttgcaaagtaatagggcttctgcctaagcctctccctccagccaataggcagctttcttaactatcctaacaagccttggaccaaatggaaataaagctttttgatgcaaaaaaaaaaaaaaaaaaa

SEQ ID NO: 62 - DNA, 2747 bp, Homo sapiens
catactccatgcccagaattcctgcctcgccactgtcctgctgccctccagacatgctggggccctgcatgctgctgctgctgctgctgctgggcctgaggctacagctctccctgggcatcatcctagttgaggaggagaacccggacttctggaaccgcgaggcagccgaggccctgggtgccgccaagaagctgcagcctgcacagacagccgccaagaacctcatcatcttcctgggcgatgggatgggggtgtctacggtgacagctgccaggatcctaaaagggcagaagaaggacaaactggggcctgagatacccctggccatggaccgcttcccatatgtggctctgtccaagacatacaatgtagacaaacatgtgccagacagtggagccacagccacggcctacctgtgcggggtcaagggcaacttccagaccattggcttgagtgcagccgcccgctttaaccagtgcaacacgacacgcggcaacgaggtcatctccgtgatgaatcgggccaagaaagcagggaagtcagtgggagtggtaaccaccacacgagtgcagcacgcctcgccagccggcacctacgcccacacggtgaaccgcaactggtactcggacgccgacgtgcctgcctcggcccgccaggaggggtgccaggacatcgctacgcagctcatctccaacatggacattgacgtgatcctaggtgggggccgaaagtacatgtttcgcatgggaaccccagaccctgagtacccagatgactacagccaaggtgggaccaggctggacgggaagaatctggtgcaggaatggctggcgaagcgccagggtgcccggtacgtgtggaaccgcactgagctcatgcaggcttccctggacccgtctgtggcccatctcatgggtctctttgagcctggagacatgaaatacgagatccaccgagactccacactggacccctccctgatggagatgacagaggctgccctgcgcctgctgagcaggaacccccgcggcttcttcctcttcgtggagggtggtcgcatcgaccatggtcatcatgaaagcagggcttaccgggcactgactgagacgatcatgttcgacgacgccattgagagggcgggccagctcaccagcgaggaggacacgctgagcctcgtcactgccgaccactcccacgtcttctccttcggaggctaccccctgcgagggagctccatcttcgggctggcccctggcaaggcccgggacaggaaggcctacacggtcctcctatacggaaacggtccaggctatgtgctcaaggacggcgcccggccggatgttaccgagagcgagagcgggagccccgagtatcggcagcagtcagcagtgcccctggacgaagagacccacgcaggcgaggacgtggcggtgttcgcgcgcggcccgcaggcgcacctggttcacggcgtgcaggagcagaccttcatagcgcacgtcatggccttcgccgcctgcctggagccctacaccgcctgcgacctggcgccccccgccggcaccaccgacgccgcgcacccggggcggtccgtggtccccgcgttgcttcctctgctggccgggaccctgctgctgctggagacggccactgctccctgagtgtcccgtccctggggctcctgcttccccatcccggagttctcctgctccccgcctcctgtcgtcctgcctggcctccagcccgagtcgtcatccccggagtccctatacagaggtcctgccatggaaccttcccctccccgtgcgctctggggactgagcccatgacaccaaacctgccccttggctgctctcggactccctaccccaaccccagggactgcaggttgtgccctgtggctgcctgcaccccaggaaaggagggggctcaggccatccagccaccacctacagcccagtgggtaccaggcaggctcccttcctggggaaaagaagcacccagaccccgcgccccgctgatctttgcttcagtccttgaatcacctgtgggacttgaggactcgggatcttcaggacgcctggagaagggtggtttcctgccaccctgctggccaaggaggctcctggggtggggatcaccagggggattttgacacagccttcggctgccccccactaagttaattccacacccctgtaccccccagggggccctctgcctcatggcaaaggcttgccccaaatctcaacttctcagacgttccatacccccacatgccaatttcagcacccaactgagatccgaggagctcctgggaagccctgggtgcaggacactggtcgagagccaaaggtccctccccagacatctggacactgggcatagatttctcaagaaggaagactcccctgcctccccagggcctctgctctcctgggagacaaagcaataataaaaggaagtgtttgtaatcccagcactttgggaggccgaggtgggcggatcacgaggtcaggagatggagaccatcctggctaacacggtgaaaccccttatctatgcgcctgtagtcccagctacccaggaggctgaagcaggataatcgcttgaacccgggcggcggagattgcagtgagccgaggtcatgccactgcactgcagcctgggcgacagagcgagattctgcctcaaaaataaacaaataaattttaaaaataaataaataataaaaggaagtgttagac

SEQ ID NO: 63 - DNA, 2062 bp, Homo sapiens
gtcagtccctcctgtagccgccgccgccgccgcccgccgcccctctgccagcagctccggcgccacctcgggccggcgtctccggcgggcgggagccaggcgctgacgggcgcggcgggggcggccgagcgctcctgcggctgcgactcaggctccggcgtctgcgcttccccatggggctggcctgcggcgcctgggcgctctgagattgtcactgctgttccaagggcacacgcagagggatttggaattcctggagagttgcctttgtgagaagctggaaatatttctttcaattccatctcttagttttccataggaacatcaagaaatcatgaacaactttggtaatgaagagtttgactgccacttcctcgatgaaggttttactgccaaggacattctggaccagaaaattaatgaagtttcttcttctgatgataaggatgccttctatgtggcagacctgggagacattctaaagaaacatctgaggtggttaaaagctctccctcgtgtcacccccttttatgcagtcaaatgtaatgatagcaaagccatcgtgaagacccttgctgctaccgggacaggatttgactgtgctagcaagactgaaatacagttggtgcagagtctgggggtgcctccagagaggattatctatgcaaatccttgtaaacaagtatctcaaattaagtatgctgctaataatggagtccagatgatgacttttgatagtgaagttgagttgatgaaagttgccagagcacatcccaaagcaaagttggttttgcggattgccactgatgattccaaagcagtctgtcgtctcagtgtgaaattcggtgccacgctcagaaccagcaggctccttttggaacgggcgaaagagctaaatatcgatgttgttggtgtcagcttccatgtaggaagcggctgtaccgatcctgagaccttcgtgcaggcaatctctgatgcccgctgtgtttttgacatgggggctgaggttggtttcagcatgtatctgcttgatattggcggtggctttcctggatctgaggatgtgaaacttaaatttgaagagatcaccggcgtaatcaacccagcgttggacaaatactttccgtcagactctggagtgagaatcatagctgagcccggcagatactatgttgcatcagctttcacgcttgcagttaatatcattgccaagaaaattgtattaaaggaacagacgggctctgatgacgaagatgagtcgagtgagcagacctttatgtattatgtgaatgatggcgtctatggatcatttaattgcatactctatgaccacgcacatgtaaagccccttctgcaaaagagacctaaaccagatgagaagtattattcatccagcatatggggaccaacatgtgatggcctcgatcggattgttgagcgctgtgacctgcctgaaatgcatgtgggtgattggatgctctttgaaaacatgggcgcttacactgttgctgctgcctctacgttcaatggcttccagaggccgacgatctactatgtgatgtcagggcctgcgtggcaactcatgcagcaattccagaaccccgacttcccacccgaagtagaggaacaggatgccagcaccctgcctgtgtcttgtgcctgggagagtgggatgaaacgccacagagcagcctgtgcttcggctagtattaatgtgtagatagcactctggtagctgttaactgcaagtttagcttgaattaagggatttggggggaccatgtaacttaattactgctagttttgaaatgtctttgtaagagtagggtcgccatgatgcagccatatggaagactaggatatgggtcacacttatctgtgttcctatggaaactatttgaatatttgttttatatggatttttattcactcttcagacacgctactcaagagtgcccctcagctgctgaacaagcatttgtagcttgtacaatggcagaatgggccaaaagcttagtgttgtgacctgtttttaaaataaagtatcttgaaataattaggc

SEQ ID NO: 64 - DNA, 3557 bp, Homo sapiens
gagagggtccttcagggtctgcttatgcccttgttcaagaacaccagtgtcagctctctgtactctggttgcagactgaccttgctcaggcctgagaaggatggggcagccaccagagtggatgctgtctgcacccatcgtcctgaccccaaaagccctggactggacagagagcggctgtactggaagctgagccagctgacccacggcatcactgagctgggcccctacaccctggacaggcacagtctctatgtcaatggtttcacccatcagagctctatgacgaccaccagaactcctgatacctccacaatgcacctggcaacctcgagaactccagcctccctgtctggacctacgaccgccagccctctcctggtgctattcacaattaacttcaccatcactaacctgcggtatgaggagaacatgcatcaccctggctctagaaagtttaacaccacggagagagtccttcagggtctgctcaggcctgtgttcaagaacaccagtgttggccctctgtactctggctgcagactgaccttgctcaggcccaagaaggatggggcagccaccaaagtggatgccatctgcacctaccgccctgatcccaaaagccctggactggacagagagcagctatactgggagctgagccagctaacccacagcatcactgagctgggcccctacaccctggacagggacagtctctatgtcaatggtttcacacagcggagctctgtgcccaccactagcattcctgggacccccacagtggacctgggaacatctgggactccagtttctaaacctggtccctcggctgccagccctctcctggtgctattcactctcaacttcaccatcaccaacctgcggtatgaggagaacatgcagcaccctggctccaggaagttcaacaccacggagagggtccttcagggcctgctcaggtccctgttcaagagcaccagtgttggccctctgtactctggctgcagactgactttgctcaggcctgaaaaggatgggacagccactggagtggatgccatctgcacccaccaccctgaccccaaaagccctaggctggacagagagcagctgtattgggagctgagccagctgacccacaatatcactgagctgggccactatgccctggacaacgacagcctctttgtcaatggtttcactcatcggagctctgtgtccaccaccagcactcctgggacccccacagtgtatctgggagcatctaagactccagcctcgatatttggcccttcagctgccagccatctcctgatactattcaccctcaacttcaccatcactaacctgcggtatgaggagaacatgtggcctggctccaggaagttcaacactacagagagggtccttcagggcctgctaaggcccttgttcaagaacaccagtgttggccctctgtactctggctccaggctgaccttgctcaggccagagaaagatggggaagccaccggagtggatgccatctgcacccaccgccctgaccccacaggccctgggctggacagagagcagctgtatttggagctgagccagctgacccacagcatcactgagctgggcccctacacactggacagggacagtctctatgtcaatggtttcacccatcggagctctgtacccaccaccagcaccggggtggtcagcgaggagccattcacactgaacttcaccatcaacaacctgcgctacatggcggacatgggccaacccggctccctcaagttcaacatcacagacaacgtcatgaagcacctgctcagtcctttgttccagaggagcagcctgggtgcacggtacacaggctgcagggtcatcgcactaaggtctgtgaagaacggtgctgagacacgggtggacctcctctgcacctacctgcagcccctcagcggcccaggtctgcctatcaagcaggtgttccatgagctgagccagcagacccatggcatcacccggctgggcccctactctctggacaaagacagcctctaccttaacggttacaatgaacctggtctagatgagcctcctacaactcccaagccagccaccacattcctgcctcctctgtcagaagccacaacagccatggggtaccacctgaagaccctcacactcaacttcaccatctccaatctccagtattcaccagatatgggcaagggctcagctacattcaactccaccgagggggtccttcagcacctgctcagacccttgttccagaagagcagcatgggccccttctacttgggttgccaactgatctccctcaggcctgagaaggatggggcagccactggtgtggacaccacctgcacctaccaccctgaccctgtgggccccgggctggacatacagcagctttactgggagctgagtcagctgacccatggtgtcacccaactgggcttctatgtcctggacagggatagcctcttcatcaatggctatgcaccccagaatttatcaatccggggcgagtaccagataaatttccacattgtcaactggaacctcagtaatccagaccccacatcctcagagtacatcaccctgctgagggacatccaggacaaggtcaccacactctacaaaggcagtcaactacatgacacattccgcttctgcctggtcaccaacttgacgatggactccgtgttggtcactgtcaaggcattgttctcctccaatttggaccccagcctggtggagcaagtctttctagataagaccctgaatgcctcattccattggctgggctccacctaccagttggtggacatccatgtgacagaaatggagtcatcagtttatcaaccaacaagcagctccagcacccagcacttctacccgaatttcaccatcaccaacctaccatattcccaggacaaagcccagccaggcaccaccaattaccagaggaacaaaaggaatattgaggatgcgctcaaccaactcttccgaaacagcagcatcaagagttatttttctgactgtcaagtttcaacattcaggtctgtccccaacaggcaccacaccggggtggactccctgtgtaacttctcgccactggctcggagagtagacagagttgccatctatgaggaatttctgcggatgacccggaatggtacccagctgcagaacttcaccctggacaggagcagtgtccttgtggatgggtattctcccaacagaaatgagcccttaactgggaattctgaccttcccttctgggctgtcatcttcatcggcttggcaggactcctgggactcatcacatgcctgatctgcggtgtcctggtgaccacccgccggcggaagaaggaaggagaatacaacgtccagcaacagtgcccaggctactaccagtcacacctagacctggaggatctgcaatgactggaacttgccggtgcctggggtgcctttcccccagccagggtccaaagaagcttggctggggcagaaataaaccatattggtcg

SEQ ID NO: 65 - DNA, 3464 bp, Homo sapiens
cagccgtgctcgaagcgttcctggagcccaagctctcctccacaggtgaagacagggccagcaggagacaccatggggcacctctcagccccacttcacagagtgcgtgtaccctggcaggggcttctgctcacagcctcacttctaaccttctggaacccgcccaccactgcccagctcactactgaatccatgccattcaatgttgcagaggggaaggaggttcttctccttgtccacaatctgccccagcaactttttggctacagctggtacaaaggggaaagagtggatggcaaccgtcaaattgtaggatatgcaataggaactcaacaagctaccccagggcccgcaaacagcggtcgagagacaatataccccaatgcatccctgctgatccagaacgtcacccagaatgacacaggattctacaccctacaagtcataaagtcagatcttgtgaatgaagaagcaactggacagttccatgtatacccggagctgcccaagccctccatctccagcaacaactccaaccctgtggaggacaaggatgctgtggccttcacctgtgaacctgagactcaggacacaacctacctgtggtggataaacaatcagagcctcccggtcagtcccaggctgcagctgtccaatggcaacaggaccctcactctactcagtgtcacaaggaatgacacaggaccctatgagtgtgaaatacagaacccagtgagtgcgaaccgcagtgacccagtcaccttgaatgtcacctatggcccggacacccccaccatttccccttcagacacctattaccgtccaggggcaaacctcagcctctcctgctatgcagcctctaacccacctgcacagtactcctggcttatcaatggaacattccagcaaagcacacaagagctctttatccctaacatcactgtgaataatagtggatcctatacctgccacgccaataactcagtcactggctgcaacaggaccacagtcaagacgatcatagtcactgagctaagtccagtagtagcaaagccccaaatcaaagccagcaagaccacagtcacaggagataaggactctgtgaacctgacctgctccacaaatgacactggaatctccatccgttggttcttcaaaaaccagagtctcccgtcctcggagaggatgaagctgtcccagggcaacaccaccctcagcataaaccctgtcaagagggaggatgctgggacgtattggtgtgaggtcttcaacccaatcagtaagaaccaaagcgaccccatcatgctgaacgtaaactataatgctctaccacaagaaaatggcctctcacctggggccattgctggcattgtgattggagtagtggccctggttgctctgatagcagtagccctggcatgttttctgcatttcgggaagaccggcagggcaagcgaccagcgtgatctcacagagcacaaaccctcagtctccaaccacactcaggaccactccaatgacccacctaacaagatgaatgaagttacttattctaccctgaactttgaagcccagcaacccacacaaccaacttcagcctccccatccctaacagccacagaaataatttattcagaagtaaaaaagcagtaatgaaacctgtcctgctcactgcagtgctgatgtatttcaagtctctcaccctcatcactaggagattcctttcccctctagggtagaggggtggggacagaaacaactttctcctactcttccttcctaataggcatctccaggctgcctggtcactgcccctctctcagtgtcaatagatgaaagtacattgggagtctgtaggaaacccaaccttcttgtcattgaaatttggcaaagctgactttgggaaagagggaccagaacttcccctcccttccccttttcccaacctggacttgttttaaacttgcctgttcagagcactcattccttcccacccccagtcctgtcctatcactctaattcggatttgccatagccttgaggttatgtccttttccattaagtacatgtgccaggaaacagcgagagagagaaagtaaacggcagtaatgcttctcctatttctccaaagccttgtgtgaactagcaaagagaagaaaaccaaatatataaccaatagtgaaatgccacaggtttgtccactgtcagggttgtctacctgtaggatcagggtctaagcaccttggtgcttagctagaataccacctaatccttctggcaagcctgtcttcagagaacccactagaagcaactaggaaaaatcacttgccaaaatccaaggcaattcctgatggaaaatgcaaaagcacatatatgttttaatatctttatgggctctgttcaaggcagtgctgagagggaggggttatagcttcaggagggaaccagcttctgataaacacaatctgctaggaacttgggaaaggaatcagagagctgcccttcagcgattatttaaattattgttaaagaatacacaatttggggtattgggatttttctccttttctctgagacattccaccattttaatttttgtaactgcttatttatgtgaaaagggttatttttacttagcttagctatgtcagccaatccgattgccttaggtgaaagaaaccaccgaaatccctcaggtcccttggtcaggagcctctcaagattttttttgtcagaggctccaaatagaaaataagaaaaggttttcttcattcatggctagagctagatttaactcagtttctaggcacctcagaccaatcatcaactaccattctattccatgtttgcacctgtgcattttctgtttgcccccattcactttgtcaggaaaccttggcctctgctaaggtgtatttggtccttgagaagtgggagcaccctacagggacactatcactcatgctggtggcattgtttacagctagaaagctgcactggtgctaatgccccttgggaaatggggctgtgaggaggaggattataacttaggcctagcctcttttaacagcctctgaaatttatcttttcttctatggggcttataaatgtatcttataataaaaaggaaggacaggaggaagacaggcaaatgtacttctcacccagtcttctacacagatggaatctctttggggctaagagaaaggttttattctatattgcttacctgatctcatgttaggcctaagaggctttctccaggaggattagcttggagttctctatactcaggtacctctttcagggttttctaaccctgacacggactgtgcatactttccctcatccatgctgtgctgtgttatttaatttttcctggctaagatcatgtctgaattatgtatgaaaattattctatgtttttataataaaaataatatatcagacatcgaaaaaaaaaa

SEQ ID NO: 66 - DNA, 1022 bp, Homo sapiens
tcctggagcccaggctcttttccacagaggaggaaagagcaggcagcagagaccatggggcccccctcagcccctccccacagagaatgcatcccctggcaggggcttctgctcacagcctcacttctaaacttctggaacccgcccaccactgccaagctcactattgaatccatgccgctcagtgtcgcagaggggaaggaggtgcttctacttgtccacaatctgccccagcatctttttggctacagctggtacaaaggggaaagagtggatggcaacagtctaattgtgggatatgtaataggaactcaacaagctaccccaggggccgcatacagcggtcgagagacaatatacaccaatgcatccctgctgatccagaatgtcacccagaatgacataggattctacaccctacaagtcataaagtcagatcttgtgaatgaagaagcaactggacagttccatgtataccaagaaaatgccccaggccttcctgtgggggccgtcgccggcatcgtgaccggggtcctggtcggagtggcgctggtggccgcgctggtgtgtttcctgctccttgccaaaactggaaggccgtggtccctcccacagctctgccttctcgatgtcccctctctccactgcctaggcccccctacccaaccccaggacagcagcttccatctatgagaagtggcttcttagcttcctccaggagctgctcctgtgggttgatggagagtccccaaggcccccagccctggggatggggaaggacatgaagcctgagccagagaaccagctataagtcctgagaagacactggtgtctggggacagggagggatggggtccctgatgaatatctggagacctcgacagcctgccctaggccctgggtgggtcaggacaaaggcctctcatcaccgcagaaagcgggggcttgcagggaaagtgaatgggcctgtggcccacctggggtcacttggaaaggatctgaataaaggggacccttcctcg

SEQ ID NO: 67 - DNA, 1190 bp, Homo sapiens
gtcagcagccccgacagccgacagtcacagcagctctgacaagagcgttcctggagcccagctcctctccacagaccacaagcacccagcagagaccatgggccccccctcagccgctccccgtggagggcacaggccctggcaggggctcctgatcacagcctcacttttaaccttctgggacccgcccaccactgtccagttcactattgaagccctgccatccagtgctgcagagggaaaggatgttcttctactggcctgcaatatttcagaaactattcaagcctattattggcacaaggggaaaacggcagaagggagccctctcattgctggttatataacagacattcaagcaaatatcccaggggccgcatacagtggtcgagagcaagtataccccaatggatccctgctgttccaaaacatcaccctggaggacgcaggatcctacaccctacgaaccataaatgccagttacgactctgaccaagcaactggccagctccacgtacaccaaaacaacgtcccaggccttcctgtgggggccgtcgctggcatcgtgactggggtcctggttggggtggctctggtggccgccctggtgtgttttctgcttctctccaggactggaagggccagcatccagcgtgacctcagggagcagccgcccccagcctccacccctggccatggtccctctcacagatccaccttctcggcccctctacccagccccagaacagccactcccatctatgtggaatttctatactctgatgcaaacatttactgccagatcgaccacaaagcagatgtggtctcttaggttcctctgggagctgctcttgtgggttgatggagcgtcctcgaagctccagccctggggacggggaaggacatggagcctgagccagagaaccagctctgagtcctgaggagacacaggcctggggacagggagggatgggagtccctgctgaatatctggagaccctgacaggttgccctgggctccgggtgggccgggacaaaggcctctcatcaccacaggaagcgggggcttgcaaggaaagtgaatgggcctgtggcccacccggggtcaccaggaaaggatctgaataaagaggacccttcctctcattggctctttttctgctcacgggaacttagcagaaactcacctg

SEQ ID NO: 68 - DNA, 2249 bp, Homo sapiens
ctcctctacaaagaggtggacagagaagacagcagagaccatgggacccccctcagcccctccctgcagattgcatgtcccctggaaggaggtcctgctcacagcctcacttctaaccttctggaacccacccaccactgccaagctcactattgaatccacgccattcaatgtcgcagaggggaaggaggttcttctactcgcccacaacctgccccagaatcgtattggttacagctggtacaaaggcgaaagagtggatggcaacagtctaattgtaggatatgtaataggaactcaacaagctaccccagggcccgcatacagtggtcgagagacaatataccccaatgcatccctgctgatccagaacgtcacccagaatgacacaggattctataccctacaagtcataaagtcagatcttgtgaatgaagaagcaaccggacagttccatgtatacccggagctgcccaagccctccatctccagcaacaactccaaccccgtggaggacaaggatgctgtggccttcacctgtgaacctgaggttcagaacacaacctacctgtggtgggtaaatggtcagagcctcccggtcagtcccaggctgcagctgtccaatggcaacatgaccctcactctactcagcgtcaaaaggaacgatgcaggatcctatgaatgtgaaatacagaacccagcgagtgccaaccgcagtgacccagtcaccctgaatgtcctctatggcccagatgtccccaccatttccccctcaaaggccaattaccgtccaggggaaaatctgaacctctcctgccacgcagcctctaacccacctgcacagtactcttggtttatcaatgggacgttccagcaatccacacaagagctctttatccccaacatcactgtgaataatagcggatcctatatgtgccaagcccataactcagccactggcctcaataggaccacagtcacgatgatcacagtctctggaagtgctcctgtcctctcagctgtggccaccgtcggcatcacgattggagtgctggccagggtggctctgatatagcagccctggtgtattttcgatatttcaggaagactggcagattggaccagaccctgaattcttctagctcctccaatcccattttatcccatggaaccactaaaaacaaggtctgctctgctcctgaagccctatatgctggagatggacaactcaatgaaaatttaaagggaaaaccctcaggcctgaggtgtgtgccactcagagacttcacctaactagagacagtcaaactgcaaaccatggtgagaaattgacgacttcacactatggacagcttttcccaagatgtcaaaacaagactcctcatcatgataaggctcttacccccttttaatttgtccttgcttatgcctgcctctttcgcttggcaggatgatgctgtcattagtatttcacaagaagtagcttcagagggtaacttaacagagtgtcagatctatcttgtcaatcccaacgttttacataaaataagagatcctttagtgcacccagtgactgacattagcagcatctttaacacagccgtgtgttcaaatgtacagtggtccttttcagagttggacttctagactcacctgttctcactccctgttttaattcaacccagccatgcaatgccaaataatagaattgctccctaccagctgaacagggaggagtctgtgcagtttctgacacttgttgttgaacatggctaaatacaatgggtatcgctgagactaagttgtagaaattaacaaatgtgctgcttggttaaaatggctacactcatctgactcattctttattctattttagttggtttgtatcttgcctaaggtgcgtagtccaactcttggtattaccctcctaatagtcatactagtagtcatactccctggtgtagtgtattctctaaaagctttaaatgtctgcatgcagccagccatcaaatagtgaatggtctctctttggctggaattacaaaactcagagaaatgtgtcatcaggagaacatcataacccatgaaggataaaagccccaaatggtggtaactgataatagcactaatgctttaagatttggtcacactctcacctaggtgagcgcattgagccagtggtgctaaatgctacatactccaactgaaatgttaaggaagaagatagatccaaaaaaaaaaaaaaaaaa

SEQ ID NO: 69 - DNA, 2292 bp, Homo sapiens
ccatgggttccccttcagcctgtccatacagagtgtgcattccctggcaggggctcctgctcacagcctcgcttttaaccttctggaacctgccaaacagtgcccagaccaatattgatgtcgtgccgttcaatgtcgcagaagggaaggaggtccttctagtagtccataatgagtcccagaatctttatggctacaactggtacaaaggggaaagggtgcatgccaactatcgaattataggatatgtaaaaaatataagtcaagaaaatgccccagggcccgcacacaacggtcgagagacaatataccccaatggaaccctgctgatccagaacgttacccacaatgacgcaggattctataccctacacgttataaaagaaaatcttgtgaatgaagaagtaaccagacaattctacgtattctcggagccacccaagccctccatcaccagcaacaacttcaatccggtggagaacaaagatattgtggttttaacctgtcaacctgagactcagaacacaacctacctgtggtgggtaaacaatcagagcctcctggtcagtcccaggctgctgctctccactgacaacaggaccctcgttctactcagcgccacaaagaatgacataggaccctatgaatgtgaaatacagaacccagtgggtgccagccgcagtgacccagtcaccctgaatgtccgctatgagtcagtacaagcaagttcacctgacctctcagctgggaccgctgtcagcatcatgattggagtactggctgggatggctctgatatagcagccttggtgtagtttctgcatttcgggaagagtgtttttattatccacctgcagactggactggattcttctagctccttcaatcccattttctcctgtggcatcactaagtataagacctgctctcttcctgaagacctataagctggaggtggacaactcaatgtaaatttcaaggaaaaaccctcatgcctgagatgtgggccactcagagctaaccaaaatgttcaacaccataactagagacactcaaattgccaaccaggacaagaagttgatgacttcatgctgtggacagtttttcccaagatgtcccaagcctcatcgtgacgaggctcttatcccactccatttttccctgctcatgcctgcctctttaatttggtaagataatgctgtaactagaatttcacaatcagcgccttgtgcaggcaatttgacagagtgttggatgtgtcatgtcatcatgtcaaacccaaatatttgacctaagggatcctttattctgcccagtggctaactttaacaacatccctaatacaactgtttattcaaatgcacggtggtccctgttagagttagacctctagactcacctgttctcacgccctgttttaatttaacccagctatgggatgccagataacagaattgctgcctacgagctgaacagggaggagtttgtgcagttgctgacacttcttgttgcacataaataaatacagtgggtactatagagactcagttgcaaaaattaacaaatatgctgcttgattaaaatgggtaggcttctcatgtggctcattctttaatctattctcttttatttggtttggttcatggggtctctgcctatggatcatacttcaaactcttggtgtgatcctcctgattgtcacaatattagttaccctggtgtgctgtattctctaaaacctttaaatgtttgcatgcagccattcgtcaaatgtcaaatattctctctttggctggaatgacaaaaactcaaataaatgtatgattaggaggacatcataacctatgaatgatggaagtccaaaatgatggtaactgacagtagtgttaatgccttatgtttagtcaaactctcatttaggtgacagcctggtgactccagaatggagccagtcatgctaaatgccatatactcacactgaaacatgaggaagcaggtagatcccagaacagacaaaactttcctaaaaacatgagagtccaggctgtctgagtcagcacagtaagaaagtcctttctgctttaactcttagaaaaaagtaatatgaagtattctgaaattaaccaatcagtttatttaaatcaatttatttatattcttctgttcctggattcccattttacaaaacccactgttctactgttgtattgcccagtaggagctatcactatattttgcagaatggaaactgccctgactcttgaatcacaaataaaagccaattgtatctgtt

SEQ ID NO: 70 - DNA, 2297 bp, Homo sapiens
agccgtgctcagaaagtttctggatcccaggctcatctccacagaggagaacacgcaggcagcagagaccatggggcccatctcagccccttcctgcagatggcgcatcccctggcaggggctcctgctcacagcctcacttttcaccttctggaacccgcccaccactgctcagctcactattgaagctgtgccatccaatgctgcagaggggaaggaggttcttctacttgtccacaatctgccccaggaccctcgtggctacaactggtacaaaggggaaacagtggatgccaaccgtcgaattataggatatgtaatatcaaatcaacagattaccccagggcctgcatacagcaatcgagagacaatataccccaatgcatccctgctgatgcggaacgtcaccagaaatgacacaggatcctacaccctacaagtcataaagctaaatcttatgagtgaagaagtaactggccagttcagcgtacatccggagactcccaagccctccatctccagcaacaactccaaccccgtggaggacaaggatgctgtggccttcacctgtgaacctgagactcagaacacaacctacctgtggtgggtaaatggtcagagtctcccggtcagtcccaggctgcagctgtccaatggcaacaggaccctcactctactcagtgtcacaaggaatgacgtaggaccctatgaatgtgaaatacagaacccagcgagtgcaaacttcagtgacccagtcaccctgaatgtcctctatggcccagatgcccccaccatttccccttcagacacctattaccatgcaggggtaaatctcaacctctcctgccatgcggcctctaatccaccctcacagtattcttggtctgtcaatggcacattccagcaatacacacaaaagctctttatccccaacatcactacaaagaacagcggatcctatgcctgccacaccactaactcagccactggccgcaacaggaccacagtcaggatgatcacagtctctgatgctttagtacaaggaagttctcctggcctctcagctagagccactgtcagcatcatgattggagtactggccagggtggctctgatatagtagctctggtgtagtttctgcatttcaagaagactggcagacagttgtttttattcttcctcaaagcatttgcaatcagctaccattcaaaattgcttcttcttcaagatttatggaaaatactctgacgagtactcttgaacacaagttcctgataactttaagatcacgccactggactgtctatgaacttgcaaacaggctgatacctttgtgaagttgcccaccaaaacacagaaggaaaaaaacatgaatttcattgaactaaataataatgaggataatgtttttaagatttttttttttttttgagatggaatctcgctctgtcgcccaggctggagtgcagtggcacgatctcaactcactgcaagctccgcctcctgggttcacaccattctcctgcctcagcctcctgagtagctgggactacaggcgcctgccacaacgcccggctaattttttgtatttttagtagagacggggtttcactgtggtctcaatctcctgacttcatggtccgcctgcctcagcctcccaaagttctgggattacaggtgtgagccaccgcgcccagcccgtttttaagattttttatttgaaaaattgccaattctttaagtgttttctttttcagatttatgaatttctttatcttttaagctatctataccttactgcaatttggtaaagcagacttttgtgaacaaaaattataacatttacttttgctccctacctgactgccacagaactgggcaactattcatgagtattcatatgtttatggtaattcagttatttgcacaagttcagtgagaatctgctgtctttataatgggatatagtttaaaacattggttatattaccaaggctttgattgggatgttatatttgagaaaatacagagaatgatagattaacggagtgtctaatctatcgtgtcaaccccaaatttttacgtatgagatcctttagtccacccaatggctgacagtaacagcatctttaacacaactctttgttcaaatgtactatggtctcttttagagtcagactcctagactcacttgttctcactgtctgttttaatttaacccaggcatgcaatgctagataataaaattgctccctattggctgatcaaaaaaaaaaaaaaaaaaaaaaaaaaaaaaa

SEQ ID NO: 71 - DNA, 1552 bp, Homo sapiens
gcccgtacacaccgtgtgctgggacaccccacagtcagccgcatggctcccctgtgccccagcccctggctccctctgttgatcccggcccctgctccaggcctcactgtgcaactgctgctgtcactgctgcttctgatgcctgtccatccccagaggttgccccggatgcaggaggattcccccttgggaggaggctcttctggggaagatgacccactgggcgaggaggatctgcccagtgaagaggattcacccagagaggaggatccacccggagaggaggatctacctggagaggaggatctacctggagaggaggatctacctgaagttaagcctaaatcagaagaagagggctccctgaagttagaggatctacctactgttgaggctcctggagatcctcaagaaccccagaataatgcccacagggacaaagaaggggatgaccagagtcattggcgctatggaggcgacccgccctggccccgggtgtccccagcctgcgcgggccgcttccagtccccggtggatatccgcccccagctcgccgccttctgcccggccctgcgccccctggaactcctgggcttccagctcccgccgctcccagaactgcgcctgcgcaacaatggccacagtgtgcaactgaccctgcctcctgggctagagatggctctgggtcccgggcgggagtaccgggctctgcagctgcatctgcactggggggctgcaggtcgtccgggctcggagcacactgtggaaggccaccgtttccctgccgagatccacgtggttcacctcagcaccgcctttgccagagttgacgaggccttggggcgcccgggaggcctggccgtgttggccgcctttctggaggagggcccggaagaaaacagtgcctatgagcagttgctgtctcgcttggaagaaatcgctgaggaaggctcagagactcaggtcccaggactggacatatctgcactcctgccctctgacttcagccgctacttccaatatgaggggtctctgactacaccgccctgtgcccagggtgtcatctggactgtgtttaaccagacagtgatgctgagtgctaagcagctccacaccctctctgacaccctgtggggacctggtgactctcggctacagctgaacttccgagcgacgcagcctttgaatgggcgagtgattgaggcctccttccctgctggagtggacagcagtcctcgggctgctgagccagtccagctgaattcctgcctggctgctggtgacatcctagccctggtttttggcctcctttttgctgtcaccagcgtcgcgttccttgtgcagatgagaaggcagcacagaaggggaaccaaagggggtgtgagctaccgcccagcagaggtagccgagactggagcctagaggctggatcttggagaatgtgagaagccagccagaggcatctgagggggagccggtaactgtcctgtcctgctcattatgccacttccttttaactgccaagaaattttttaaaataaatatttataat

SEQ ID NO: 72 - protein, 702 aa, Homo sapiens
MESPSAPPHRWCIPWQRLLLTASLLTFWNPPTTAKLTIESTPFNVAEGKEVLLLVHNLPQHLFGYSWYKGERVDGNRQIIGYVIGTQQATPGPAYSGREIIYPNASLLIQNIIQNDTGFYTLHVIKSDLVNEEATGQFRVYPELPKPSISSNNSKPVEDKDAVAFTCEPETQDATYLWWVNNQSLPVSPRLQLSNGNRTLTLFNVTRNDTASYKCETQNPVSARRSDSVILNVLYGPDAPTISPLNTSYRSGENLNLSCHAASNPPAQYSWFVNGTFQQSTQELFIPNITVNNSGSYTCQAHNSDTGLNRTTVTTITVYAEPPKPFITSNNSNPVEDEDAVALTCEPEIQNTTYLWWVNNQSLPVSPRLQLSNDNRTLTLLSVTRNDVGPYECGIQNELSVDHSDPVILNVLYGPDDPTISPSYTYYRPGVNLSLSCHAASNPPAQYSWLIDGNIQQHTQELFISNITEKNSGLYTCQANNSASGHSRTTVKTITVSAELPKPSISSNNSKPVEDKDAVAFTCEPEAQNTTYLWWVNGQSLPVSPRLQLSNGNRTLTLFNVTRNDARAYVCGIQNSVSANRSDPVTLDVLYGPDTPIISPPDSSYLSGANLNLSCHSASNPSPQYSWRINGIPQQHTQVLFIAKITPNNNGTYACFVSNLATGRNNSIVKSITVSASGTSPGLSAGATVGIMIGVLVGVALI

SEQ ID NO: 73 - protein, 609 aa, Homo sapiens
MKWVESIFLIFLLNFTESRTLHRNEYGIASILDSYQCTAEISLADLATIFFAQFVQEATYKEVSKMVKDALTAIEKPTGDEQSSGCLENQLPAFLEELCHEKEILEKYGHSDCCSQSEEGRHNCFLAHKKPTPASIPLFQVPEPVTSCEAYEEDRETFMNKFIYEIARRHPFLYAPTILLWAARYDKIIPSCCKAENAVECFQTKAATVTKELRESSLLNQHACAVMKNFGTRTFQAITVTKLSQKFTKVNFTEIQKLVLDVAHVHEHCCRGDVLDCLQDGEKIMSYICSQQDTLSNKITECCKLTTLERGQCIIHAENDEKPEGLSPNLNRFLGDRDFNQFSSGEKNIFLASFVHEYSRRHPQLAVSVILRVAKGYQELLEKCFQTENPLECQDKGEEELQKYIQESQALAKRSCGLFQKLGEYYLQNAFLVAYTKKAPQLTSSELMAITRKMAATAATCCQLSEDKLLACGEGAADIIIGHLCIRHEMTPVNPGVGQCCTSSYANRRPCFSSLVVDETYVPPAFSDDKFIFHKDLCQAQGVALQTMKQEFLINLVKQKPQITEEQLEAVIADFSGLLEKCCQGQEQEVCFAEEGQKLISKTRAALGV

SEQ ID NO: 74 - protein, 99 aa, Homo sapiens
MTSKLAVALLAAFLISAALCEGAVLPRSAKELRCQCIKTYSKPFHPKFIKELRVIESGPHCANTEIIVKLSDGRELCLDPKENWVQRVVEKFLKRAENS

SEQ ID NO: 75 - protein, 300 aa, Homo sapiens
MRIAVICFCLLGITCAIPVKQADSGSSEEKQLYNKYPDAVATWLNPDPSQKQNLLAPQTLPSKSNESHDHMDDMDDEDDDDHVDSQDSIDSNDSDDVDDTDDSHQSDESHHSDESDELVTDFPTDLPATEVFTPVVPTVDTYDGRGDSVVYGLRSKSKKFRRPDIQYPDATDEDITSHMESEELNGAYKAIPVAQDLNAPSDWDSRGKDSYETSQLDDQSAETHSHKQSRLYKRKANDESNEHSDVIDSQELSKVSREFHSHEFHSHEDMLVVDPKSKEEDKHLKFRISHELDSASSEVN

SEQ ID NO: 76 - protein, 871 aa, Homo sapiens
MKYSCCALVLAVLGTELLGSLCSTVRSPRFRGRIQQERKNIRPNIILVLTDDQDVELGSLQVMNKTRKIMEHGGATFINAFVTTPMCCPSRSSMLTGKYVHNHNVYTNNENCSSPSWQAMHEPRTFAVYLNNTGYRTAFFGKYLNEYNGSYIPPGWREWLGLIKNSRFYNYTVCRNGIKEKHGFDYAKDYFTDLITNESINYFKMSKRMYPHRPVMMVISHAAPHGPEDSAPQFSKLYPNASQHITPSYNYAPNMDKHWIMQYTGPMLPIHMEFTNILQRKRLQTLMSVDDSVERLYNMLVETGELENTYIIYTADHGYHIGQFGLVKGKSMPYDFDIRVPFFIRGPSVEPGSIVPQIVLNIDLAPTILDIAGLDTPPDVDGKSVLKLLDPEKPGNRFRTNKKAKIWRDTFLVERGKFLRKKEESSKNIQQSNHLPKYERVKELCQQARYQTACEQPGQKWQCIEDTSGKLRIHKCKGPSDLLTVRQSTRNLYARGFHDKDKECSCRESGYRASRSQRKSQRQFLRNQGTPKYKPRFVHTRQTRSLSVEFEGEIYDINLEEEEELQVLQPRNIAKRHDEGHKGPRDLQASSGGNRGRMLADSSNAVGPPTTVRVTHKCFILPNDSIHCERELYQSARAWKDHKAYIDKEIEALQDKIKNLREVRGHLKRRKPEECSCSKQSYYNKEKGVKKQEKLKSHLHPFKEAAQEVDSKLQLFKENNRRRKKERKEKRRQRKGEECSLPGLTCFTHDNNHWQTAPFWNLGSFCACTSSNNNTYWCLRTVNETHNFLFCEFATGFLEYFDMNTDPYQLTNTVHTVERGILNQLHVQLMELRSCQGYKQCNPRPKNLDVGNKDGGSYDLHRGQLWDGWEG

SEQ ID NO: 77 - protein, 470 aa, Homo sapiens
MKFLLILLLQATASGALPLNSSTSLEKNNVLFGERYLEKFYGLEINKLPVTKMKYSGNLMKEKIQEMQHFLGLKVTGQLDTSTLEMMHAPRCGVPDLHHFREMPGGPVWRKHYITYRINNYTPDMNREDVDYAIRKAFQVWSNVTPLKFSKINTGMADILVVFARGAHGDFHAFDGKGGILAHAFGPGSGIGGDAHFDEDEFWTTHSGGTNLFLTAVHEIGHSLGLGHSSDPKAVMFPTYKYVDINTFRLSADDIRGIQSLYGDPKENQRLPNPDNSEPALCDPNLSFDAVTTVGNKIFFFKDRFFWLKVSERPKTSVNLISSLWPTLPSGIEAAYEIEARNQVFLFKDDKYWLISNLRPEPNYPKSIHSFGFPNFVKKIDAAVFNPRFYRTYFFVDNQYWRYDERRQMMDPGYPKLITKNFQGIGPKIDAVFYSKNKYYYFFQGSNQFEYDFLLQRITKTLKSNSWFGC

SEQ ID NO: 78 - protein, 165 aa, Homo sapiens
MAPNASCLCVHVRSEEWDLMTFDANPYDSVKKIKEHVRSKTKVPVQDQVLLLGSKILKPRRSLSSYGIDKEKTIHLTLKVVKPSDEELPLFLVESGDEAKRHLLQVRRSSSVAQVKAMIETKTGIIPETQIVTCNGKRLEDGKMMADYGIRKGNLLFLASYCIGG

SEQ ID NO: 79 - protein, 1464 aa, Homo sapiens
MFSFVDLRLLLLLAATALLTHGQEEGQVEGQDEDIPPITCVQNGLRYHDRDVWKPEPCRICVCDNGKVLCDDVICDETKNCPGAEVPEGECCPVCPDGSESPTDQETTGVEGPKGDTGPRGPRGPAGPPGRDGIPGQPGLPGPPGPPGPPGPPGLGGNFAPQLSYGYDEKSTGGISVPGPMGPSGPRGLPGPPGAPGPQGFQGPPGEPGEPGASGPMGPRGPPGPPGKNGDDGEAGKPGRPGERGPPGPQGARGLPGTAGLPGMKGHRGFSGLDGAKGDAGPAGPKGEPGSPGENGAPGQMGPRGLPGERGRPGAPGPAGARGNDGATGAAGPPGPTGPAGPPGFPGAVGAKGEAGPQGPRGSEGPQGVRGEPGPPGPAGAAGPAGNPGADGQPGAKGANGAPGIAGAPGFPGARGPSGPQGPGGPPGPKGNSGEPGAPGSKGDTGAKGEPGPVGVQGPPGPAGEEGKRGARGEPGPTGLPGPPGERGGPGSRGFPGADGVAGPKGPAGERGSPGPAGPKGSPGEAGRPGEAGLPGAKGLTGSPGSPGPDGKTGPPGPAGQDGRPGPPGPPGARGQAGVMGFPGPKGAAGEPGKAGERGVPGPPGAVGPAGKDGEAGAQGPPGPAGPAGERGEQGPAGSPGFQGLPGPAGPPGEAGKPGEQGVPGDLGAPGPSGARGERGFPGERGVQGPPGPAGPRGANGAPGNDGAKGDAGAPGAPGSQGAPGLQGMPGERGAAGLPGPKGDRGDAGPKGADGSPGKDGVRGLTGPIGPPGPAGAPGDKGESGPSGPAGPTGARGAPGDRGEPGPPGPAGFAGPPGADGQPGAKGEPGDAGAKGDAGPPGPAGPAGPPGPIGNVGAPGAKGARGSAGPPGATGFPGAAGRVGPPGPSGNAGPPGPPGPAGKEGGKGPRGETGPAGRPGEVGPPGPPGPAGEKGSPGADGPAGAPGTPGPQGIAGQRGVVGLPGQRGERGFPGLPGPSGEPGKQGPSGASGERGPPGPMGPPGLAGPPGESGREGAPAAEGSPGRDGSPGAKGDRGETGPAGPPGAPGAPGAPGPVGPAGKSGDRGETGPAGPAGPVGPVGARGPAGPQGPRGDKGETGEQGDRGIKGHRGFSGLQGPPGPPGSPGEQGPSGASGPAGPRGPPGSAGAPGKDGLNGLPGPIGPPGPRGRTGDAGPVGPPGPPGPPGPPGPPSAGFDFSFLPQPPQEKAHDGGRYYRADDANVVRDRDLEVDTTLKSLSQQIENIRSPEGSRKNPARTCRDLKMCHSDWKSGEYWIDPNQGCNLDAIKVFCNMETGETCVYPTQPSVAQKNWYISKNPKDKRHVWFGESMTDGFQFEYGGQGSDPADVAIQLTFLRLMSTEASQNITYHCKNSVAYMDQQTGNLKKALLLKGSNEIEIRAEGNSRFTYSVTVDGCTSHTGAWGKTVIEYKTTKSSRLPIIDVAPLDVGAPDQEFGFDVGPVCFL

SEQ ID NO: 80 - protein, 338 aa, Homo sapiens
MSLSAFTLFLALIGGTSGQYYDYDFPLSIYGQSSPNCAPECNCPESYPSAMYCDELKLKSVPMVPPGIKYLYLRNNQIDHIDEKAFENVTDLQWLILDHNLLENSKIKGRVFSKLKQLKKLHINHNNLTESVGPLPKSLEDLQLTHNKITKLGSFEGLVNLTFIHLQHNRLKEDAVSAAFKGLKSLEYLDLSFNQIARLPSGLPVSLLTLYLDNNKISNIPDEYFKRFNALQYLRLSHNELADSGIPGNSFNVSSLVELDLSYNKLKNIPTVNENLENYYLEVNQLEKFDIKSFCKILGPLSYSKIKHLRLDGNRISETSLPPDMYECLRVANEVTLN

SEQ ID NO: 81 - protein, 589 aa, Homo sapiens
MSVSVHENRKSRASSGSINIYLFHKSSYADSVLTHLNLLRQQRLFTDVLLHAGNRTFPCHRAVLAACSRYFEAMFSGGLKESQDSEVNFDNSIHPEVLELLLDYAYSSRVIINEENAESLLEAGDMLEFQDIRDACAEFLEKNLHPTNCLGMLLLSDAHQCTKLYELSWRMCLSNFQTIRKNEDFLQLPQDMVVQLLSSEELETEDERLVYESAINWISYDLKKRYCYLPELLQTVRLALLPAIYLMENVAMEELITKQRKSKEIVEEAIRCKLKILQNDGVVTSLCARPRKTGHALFLLGGQTFMCDKLYLVDQKAKEIIPKADIPSPRKEFSACAIGCKVYITGGRGSENGVSKDVWVYDTLHEEWSKAAPMLVARFGHGSAELKHCLYVVGGHTAATGCLPASPSVSLKQVEHYDPTINKWTMVAPLREGVSNAAVVSAKLKLFAFGGTSVSHDKLPKVQCYDQCENRWTVPATCPQPWRYTAAAVLGNQIFIMGGDTEFSACSAYKFNSETYQWTKVGDVTAKRMSCHAVASGNKLYVVGGYFGIQRCKTLDCYDPTLDVWNSITTVPYSLIPTAFVSTWKHLPS

SEQ ID NO: 82 - protein, 193 aa, Homo sapiens
MIRCGLACERCRWILPLLLLSAIAFDIIALAGRGWLQSSDHGQTSSLWWKCSQEGGGSGSYEEGCQSLMEYAWGRAAAAMLFCGFIILVICFILSFFALCGPQMLVFLRVIGGLLALAAVFQIISLVIYPVKYTQTFTLHANPAVTYIYNWAYGFGWAATIILIGCAFFFCCLLNYEDDLLGNAKPRYFYTSA

SEQ ID NO: 83 - protein, 423 aa, Homo sapiens
MRSSGADAGRCLVTARAPGSVPASREGSAGSRGPGARFPARVSARGSAPGPGLGGAGALDPPAVVAESVSSLTIADAFIAAGESSAPTPPRPALPRRFICSFPDCSANYSKAWKLDAHLCKHTGERPFVCDYEGCGKAFIRDYHLSRHILTHTGEKPFVCAANGCDQKFNTKSNLKKHFERKHENQQKQYICSFEDCKKTFKKHQQLKIHQCQNTNEPLFKCTQEGCGKHFASPSKLKRHAKAHEGYVCQKGCSFVAKTWTELLKHVRETHKEEILCEVCRKTFKRKDYLKQHMKTHAPERDVCRCPREGCGRTYTTVFNLQSHILSFHEESRPFVCEHAGCGKTFAMKQSLTRHAVVHDPDKKKMKLKVKKSREKREFGLSSQWIYPPKRKQGQGLSLCQNGESPNCVEDKMLSTVAVLTLG

SEQ ID NO: 84 - protein, 339 aa, Homo sapiens
MWQLWASLCCLLVLANARSRPSFHPLSDELVNYVNKRNTTWQAGHNFYNVDMSYLKRLCGTFLGGPKPPQRVMFTEDLKLPASFDAREQWPQCPTIKEIRDQGSCGSCWAFGAVEAISDRICIHTNAHVSVEVSAEDLLTCCGSMCGDGCNGGYPAEAWNFWTRKGLVSGGLYESHVGCRPYSIPPCEHHVNGSRPPCTGEGDTPKCSKICEPGYSPTYKQDKHYGYNSYSVSNSEKDIMAEIYKNGPVEGAFSVYSDFLLYKSGVYQHVTGEMMGGHAIRILGWGVENGTPYWLVANSWNTDWGDNGFFKILRGQDHCGIESEVVAGIPRTDQYWEKI

SEQ ID NO: 85 - protein, 150 aa, Homo sapiens
MAARGVIAPVGESLRYAEYLQPSAKRPDADVDQQGLVRSLIAVGLGVAALAFAGRYAFRIWKPLEQVITETAKKISTPSFSSYYKGGFEQKMSRREAGLILGVSPSAGKAKIRTAHRRVMILNHPDKGGSPYVAAKINEAKDLLETTTKH

SEQ ID NO: 86 - protein, 1212 aa, Homo sapiens
MEPRPTAPSSGAPGLAGVGETPSAAALAAARVELPGTAVPSVPEDAAPASRDGGGVRDEGPAAAGDGLGRPLGPTPSQSRFQVDLVSENAGRAAAAAAAAAAAAAAAGAGAGAKQTPADGEASGESEPAKGSEEAKGRFRVNFVDPAASSSAEDSLSDAAGVGVDGPNVSFQNGGDTVLSEGSSLHSGGGGGSGHHQHYYYDTHTNTYYLRTFGHNTMDAVPRIDHYRHTAAQLGEKLLRPSLAELHDELEKEPFEDGFANGEESTPTRDAVVTYTAESKGVVKFGWIKGVLVRCMLNIWGVMLFIRLSWIVGQAGIGLSVLVIMMATVVTTITGLSTSAIATNGFVRGGGAYYLISRSLGPEFGGAIGLIFAFANAVAVAMYVVGFAETVVELLKEHSILMIDEINDIRIIGAITVVILLGISVAGMEWEAKAQIVLLVILLLAIGDFVIGTFIPLESKKPKGFFGYKSEIFNENFGPDFREEETFFSVFAIFFPAATGILAGANISGDLADPQSAIPKGTLLAILITTLVYVGIAVSVGSCVVRDATGNVNDTIVTELTNCTSAACKLNFDFSSCESSPCSYGLMNNFQVMSMVSGFTPLISAGIFSATLSSALASLVSAPKIFQALCKDNIYPAFQMFAKGYGKNNEPLRGYILTFLIALGFILIAELNVIAPIISNFFLASYALINFSVFHASLAKSPGWRPAFKYYNMWISLLGAILCCIVMFVINWWAALLTYVIVLGLYIYVTYKKPDVNWGSSTQALTYLNALQHSIRLSGVEDHVKNFRPQCLVMTGAPNSRPALLHLVHDFTKNVGLMICGHVHMGPRRQAMKEMSIDQAKYQRWLIKNKMKAFYAPVHADDLREGAQYLMQAAGLGRMKPNTLVLGFKKDWLQADMRDVDMYINLFHDAFDIQYGVVVIRLKEGLDISHLQGQEELLSSQEKSPGTKDVVVSVEYSKKSDLDTSKPLSEKPITHKVEEEDGKTATQPLLKKESKGPIVPLNVADQKLLEASTQFQKKQGKNTIDVWWLFDDGGLTLLIPYLLTTKKKWKDCKIRVFIGGKINRIDHDRRAMATLLSKFRIDFSDIMVLGDINTKPKKENIIAFEEIIEPYRLHEDDKEQDIADKMKEDEPWRITDNELELYKTKTYRQIRLNELLKEHSSTANIIVMSLPVARKGAVSSALYMAWLEALSKDLPPILLVRGNHQSVLTFYS

SEQ ID NO: 87 - protein, 230 aa, Homo sapiens
MNEMYLRCDHENQYAQWMAACMLASKGKTMADSSYQPEVLNILSFLRMKNRNSASQVASSLENMDMNPECFVSPRCAKRHKSKQLAARILEAHQNVAQMPLVEAKLRFIQAWQSLPEFGLTYYLVRFKGSKKDDILGVSYNRLIKIDAATGIPVTTWRFTNIKQWNVNWETRQVVIEFDQNVFTAFTCLSADCKIVHEYIGGYIFLSTRSKDQNETLDEDLFHKLTGGQD

SEQ ID NO: 88 - protein, 383 aa, Homo sapiens
MEALGKLKQFDAYPKTLEDFRVKTCGGATVTIVSGLLMLLLFLSELQYYLTTEVHPELYVDKSRGDKLKINIDVLFPHMPCAYLSIDAMDVAGEQQLDVEHNLFKQRLDKDGIPVSSEAERHELGKVEVTVFDPDSLDPDRCESCYGAEAEDIKCCNTCEDVREAYRRRGWAFKNPDTIEQCRREGFSQKMQEQKNEGCQVYGFLEVNKVAGNFHFAPGKSFQQSHVHVHDLQSFGLDNINMTHYIQHLSFGEDYPGIVNPLDHTNVTAPQASMMFQYFVKVVPTVYMKVDGEVLRTNQFSVTRHEKVANGLLGDQGLPGVFVLYELSPMMVKLTEKHRSFTHFLTGVCAIIGGMFTVAGLIDSLIYHSARAIQKKIDLGKTT

SEQ ID NO: 89 - protein, 391 aa, Homo sapiens
MADIDNKEQSELDQDLDDVEEVEEEETGEETKLKARQLTVQMMQNPQILAALQERLDGLVETPTGYIESLPRVVKRRVNALKNLQVKCAQIEAKFYEEVHDLERKYAVLYQPLFDKRFEIINAIYEPTEEECEWKPDEEDEISEELKEKAKIEDEKKDEEKEDPKGIPEFWLTVFKNVDLLSDMVQEHDEPILKHLKDIKVKFSDAGQPMSFVLEFHFEPNEYFTNEVLTKTYRMRSEPDDSDPFSFDGPEIMGCTGCQIDWKKGKNVTLKTIKKKQKHKGRGTVRTVTKTVSNDSFFNFFAPPEVPESGDLDDDAEAILAADFEIGHFLRERIIPRSVLYFTGEAIEDDDDDYDEEGEEADEEGEEEGDEENDPDYDPKKDQNPAECKQQ

SEQ ID NO: 90 - protein, 836 aa, Homo sapiens
MIPFLPMFSLLLLLIVNPINANNHYDKILAHSRIRGRDQGPNVCALQQILGTKKKYFSTCKNWYKKSICGQKTTVLYECCPGYMRMEGMKGCPAVLPIDHVYGTLGIVGATTTQRYSDASKLREEIEGKGSFTYFAPSNEAWDNLDSDIRRGLESNVNVELLNALHSHMINKRMLTKDLKNGMIIPSMYNNLGLFINHYPNGVVTVNCARIIHGNQIATNGVVHVIDRVLTQIGTSIQDFIEAEDDLSSFRAAAITSDILEALGRDGHFTLFAPTNEAFEKLPRGVLERFMGDKVASEALMKYHILNTLQCSESIMGGAVFETLEGNTIEIGCDGDSITVNGIKMVNKKDIVTNNGVIHLIDQVLIPDSAKQVIELAGKQQTTFTDLVAQLGLASALRPDGEYTLLAPVNNAFSDDTLSMVQRLLKLILQNHILKVKVGLNELYNGQILETIGGKQLRVFVYRTAVCIENSCMEKGSKQGRNGAIHIFREIIKPAEKSLHEKLKQDKRFSTFLSLLEAADLKELLTQPGDWTLFVPTNDAFKGMTSEEKEILIRDKNALQNIILYHLTPGVFIGKGFEPGVTNILKTTQGSKIFLKEVNDTLLVNELKSKESDIMTTNGVIHVVDKLLYPADTPVGNDQLLEILNKLIKYIQIKFVRGSTFKEIPVTVYTTKIITKVVEPKIKVIEGSLQPIIKTEGPTLTKVKIEGEPEFRLIKEGETITEVIHGEPIIKKYTKIIDGVPVEITEKETREERIITGPEIKYTRISTGGGETEETLKKLLQEEVTKVTKFIEGGDGHLFEDEEIKRLLQGDTPVRKLQANKKVQGSRRRLREGRSQ

SEQ ID NO: 91 - protein, 3176 aa, Homo sapiens
MRKHRHLPLVAVFCLFLSGFPTTHAQQQQADVKNGAAADIIFLVDSSWTIGEEHFQLVREFLYDVVKSLAVGENDFHFALVQFNGNPHTEFLLNTYRTKQEVLSHISNMSYIGGTNQTGKGLEYIMQSHLTKAAGSRAGDGVPQVIVVLTDGHSKDGLALPSAELKSADVNVFAIGVEDADEGALKEIASEPLNMHMFNLENFTSLHDIVGNLVSCVHSSVSPERAGDTETLKDITAQDSADIIFLIDGSNNTGSVNFAVILDFLVNLLEKLPIGTQQIRVGVVQFSDEPRTMFSLDTYSTKAQVLGAVKALGFAGGELANIGLALDFVVENHFTRAGGSRVEEGVPQVLVLISAGPSSDEIRYGVVALKQASVFSFGLGAQAASRAELQHIATDDNLVFTVPEFRSFGDLQEKLLPYIVGVAQRHIVLKPPTIVTQVIEVNKRDIVFLVDGSSALGLANFNAIRDFIAKVIQRLEIGQDLIQVAVAQYADTVRPEFYFNTHPTKREVITAVRKMKPLDGSALYTGSALDFVRNNLFTSSAGYRAAEGIPKLLVLITGGKSLDEISQPAQELKRSSIMAFAIGNKGADQAELEEIAFDSSLVFIPAEFRAAPLQGMLPGLLAPLRTLSGTPEVHSNKRDIIFLLDGSANVGKTNFPYVRDFVMNLVNSLDIGNDNIRVGLVQFSDTPVTEFSLNTYQTKSDILGHLRQLQLQGGSGLNTGSALSYVYANHFTEAGGSRIREHVPQLLLLLTAGQSEDSYLQAANALTRAGILTFCVGASQANKAELEQIAFNPSLVYLMDDFSSLPALPQQLIQPLTTYVSGGVEEVPLAQPESKRDILFLFDGSANLVGQFPVVRDFLYKIIDELNVKPEGTRIAVAQYSDDVKVESRFDEHQSKPEILNLVKRMKIKTGKALNLGYALDYAQRYIFVKSAGSRIEDGVLQFLVLLVAGRSSDRVDGPASNLKQSGVVPFIFQAKNADPAELEQIVLSPAFILAAESLPKIGDLHPQIVNLLKSVHNGAPAPVSGEKDVVFLLDGSEGVRSGFPLLKEFVQRVVESLDVGQDRVRVAVVQYSDRTRPEFYLNSYMNKQDVVNAVRQLTLLGGPTPNTGAALEFVLRNILVSSAGSRITEGVPQLLIVLTADRSGDDVRNPSVVVKRGGAVPIGIGIGNADITEMQTISFIPDFAVAIPTFRQLGTVQQVISERVTQLTREELSRLQPVLQPLPSPGVGGKRDVVFLIDGSQSAGPEFQYVRTLIERLVDYLDVGFDTTRVAVIQFSDDPKAEFLLNAHSSKDEVQNAVQRLRPKGGRQINVGNALEYVSRNIFKRPLGSRIEEGVPQFLVLISSGKSDDEVVVPAVELKQFGVAPFTIARNADQEELVKISLSPEYVFSVSTFRELPSLEQKLLTPITTLTSEQIQKLLASTRYPPPAVESDAADIVFLIDSSEGVRPDGFAHIRDFVSRIVRRLNIGPSKVRVGVVQFSNDVFPEFYLKTYRSQAPVLDAIRRLRLRGGSPLNTGKALEFVARNLFVKSAGSRIEDGVPQHLVLVLGGKSQDDVSRFAQVIRSSGIVSLGVGDRNIDRTELQTITNDPRLVFTVREFRELPNIEERIMNSFGPSAATPAPPGVDTPPPSRPEKKKADIVFLLDGSINFRRDSFQEVLRFVSEIVDTVYEDGDSIQVGLVQYNSDPTDEFFLKDFSTKRQIIDAINKVVYKGGRHANTKVGLEHLRVNHFVPEAGSRLDQRVPQIAFVITGGKSVEDAQDVSLALTQRGVKVFAVGVRNIDSEEVGKIASNSATAFRVGNVQELSELSEQVLETLHDAMHETLCPGVTDAAKACNLDVILGFDGSRDQNVFVAQKGFESKVDAILNRISQMHRVSCSGGRSPTVRVSVVANTPSGPVEAFDFDEYQPEMLEKFRNMRSQHPYVLTEDTLKVYLNKFRQSSPDSVKVVIHFTDGADGDLADLHRASENLRQEGVRALILVGLERVVNLERLMHLEFGRGFMYDRPLRLNLLDLDYELAEQLDNIAEKACCGVPCKCSGQRGDRGPIGSIGPKGIPGEDGYRGYPGDEGGPGERGPPGVNGTQGFQGCPGQRGVKGSRGFPGEKGEVGEIGLDGLDGEDGDKGLPGSSGEKGNPGRRGDKGPRGEKGERGDVGIRGDPGNPGQDSQERGPKGETGDLGPMGVPGRDGVPGGPGETGKNGGFGRRGPPGAKGNKGGPGQPGFEGEQGTRGAQGPAGPAGPPGLIGEQGISGPRGSGGARGAPGERGRTGPLGRKGEPGEPGPKGGIGNPGPRGETGDDGRDGVGSEGRRGKKGERGFPGYPGPKGNPGEPGLNGTTGPKGIRGRRGNSGPPGIVGQKGRPGYPGPAGPRGNRGDSIDQCALIQSIKDKCPCCYGPLECPVFPTELAFALDTSEGVNQDTFGRMRDVVLSIVNVLTIAESNCPTGARVAVVTYNNEVTTEIRFADSKRKSVLLDKIKNLQVALTSKQQSLETAMSFVARNTFKRVRNGFLMRKVAVFFSNTPTRASPQLREAVLKLSDAGITPLFLTRQEDRQLINALQINNTAVGHALVLPAGRDLTDFLENVLTCHVCLDICNIDPSCGFGSWRPSFRDRRAAGSDVDIDMAFILDSAETTTLFQFNEMKKYIAYLVRQLDMSPDPKASQHFARVAVVQHAPSESVDNASMPPVKVEFSLTDYGSKEKLVDFLSRGMTQLQGTRALGSAIEYTIENVFESAPNPRDLKIVVLMLTGEVPEQQLEEAQRVILQAKCKGYFFVVLGIGRKVNIKEVYTFASEPNDVFFKLVDKSTELNEEPLMRFGRLLPSFVSSENAFYLSPDIRKQCDWFQGDQPTKNLVKFGHKQVNVPNNVTSSPTSNPVTTTKPVTTTKPVTTTTKPVTTTTKPVTIINQPSVKPAAAKPAPAKPVAAKPVATKTATVRPPVAVKPATAAKPVAAKPAAVRPPAAAAKPVATKPEVPRPQAAKPAATKPATTKPVVKMLREVQVFEITENSAKLHWERPEPPGPYFYDLTVTSAHDQSLVLKQNLTVTDRVIGGLLAGQTYHVAVVCYLRSQVRATYHGSFSTKKSQPPPPQPARSASSSTINLMVSTEPLALTETDICKLPKDEGTCRDFILKWYYDPNTKSCARFWYGGCGGNENKFGSQKECEKVCAPVLAKPGVISVMGT

SEQ ID NO: 92 - protein, 303 aa, Homo sapiens
MRAWIFFLLCLAGRALAAPQQEALPDETEVVEETVAEVTEVSVGANPVQVEVGEFDDGAEETEEEVVAENPCQNHHCKHGKVCELDENNTPMCVCQDPTSCPAPIGEFEKVCSNDNKTFDSSCHFFATKCTLEGTKKGHKLHLDYIGPCKYIPPCLDSELTEFPLRMRDWLKNVLVTLYERDEDNNLLTEKQKLRVKKIHENEKRLEAGDHPVELLARDFEKNYNMYIFPVHWQFGQLDQHPIDGYLSHTELAPLRAPLIPMEHCTTRFFETCDLDNDKYIALDEWAGCFGIKQKDIDKDLVI

SEQ ID NO: 93 - protein, 683 aa, Homo sapiens
MALFVRLLALALALALGPAATLAGPAKSPYQLVLQHSRLRGRQHGPNVCAVQKVIGTNRKYFTNCKQWYQRKICGKSTVISYECCPGYEKVPGEKGCPAALPLSNLYETLGVVGSTTTQLYTDRTEKLRPEMEGPGSFTIFAPSNEAWASLPAEVLDSLVSNVNIELLNALRYHMVGRRVLTDELKHGMTLTSMYQNSNIQIHHYPNGIVTVNCARLLKADHHATNGVVHLIDKVISTITNNIQQIIEIEDTFETLRAAVAASGLNTMLEGNGQYTLLAPTNEAFEKIPSETLNRILGDPEALRDLLNNHILKSAMCAEAIVAGLSVETLEGTTLEVGCSGDMLTINGKAIISNKDILATNGVIHYIDELLIPDSAKTLFELAAESDVSTAIDLFRQAGLGNHLSGSERLTLLAPLNSVFKDGTPPIDAHTRNLLRNHIIKDQLASKYLYHGQTLETLGGKKLRVFVYRNSLCIENSCIAAHDKRGRYGTLFTMDRVLTPPMGTVMDVLKGDNRFSMLVAAIQSAGLTETLNREGVYTVFAPTNEAFRALPPRERSRLLGDAKELANILKYHIGDEILVSGGIGALVRLKSLQGDKLEVSLKNNVVSVNKEPVAEPDIMATNGVVHVITNVLQPPANRPQERGDELADSALEIFKQASAFSRASQRSVRLAPVYQKLLERMKH

SEQ ID NO: 94 - protein, 2355 aa, Homo sapiens
MLRGPGPGLLLLAVQCLGTAVPSTGASKSKRQAQQMVQPQSPVAVSQSKPGCYDNGKHYQINQQWERTYLGNALVCTCYGGSRGFNCESKPEAEETCFDKYTGNTYRVGDTYERPKDSMIWDCTCIGAGRGRISCTIANRCHEGGQSYKIGDTWRRPHETGGYMLECVCLGNGKGEWTCKPIAEKCFDHAAGTSYVVGETWEKPYQGWMMVDCTCLGEGSGRITCTSRNRCNDQDTRTSYRIGDTWSKKDNRGNLLQCICTGNGRGEWKCERHTSVQTTSSGSGPFTDVRAAVYQPQPHPQPPPYGHCVTDSGVVYSVGMQWLKTQGNKQMLCTCLGNGVSCQETAVTQTYGGNSNGEPCVLPFTYNGRTFYSCTTEGRQDGHLWCSTTSNYEQDQKYSFCTDHTVLVQTRGGNSNGALCHFPFLYNNHNYTDCTSEGRRDNMKWCGTTQNYDADQKFGFCPMAAHEEICTTNEGVMYRIGDQWDKQHDMGHMMRCTCVGNGRGEWTCIAYSQLRDQCIVDDITYNVNDTFHKRHEEGHMLNCTCFGQGRGRWKCDPVDQCQDSETGTFYQIGDSWEKYVHGVRYQCYCYGRGIGEWHCQPLQTYPSSSGPVEVFITETPSQPNSHPIQWNAPQPSHISKYILRWRPKNSVGRWKEATIPGHLNSYTIKGLKPGVVYEGQLISIQQYGHQEVTRFDFTTTSTSTPVTSNTVTGETTPFSPLVATSESVTEITASSFVVSWVSASDTVSGFRVEYELSEEGDEPQYLDLPSTATSVNIPDLLPGRKYIVNVYQISEDGEQSLILSTSQTTAPDAPPDPTVDQVDDTSIVVRWSRPQAPITGYRIVYSPSVEGSSTELNLPETANSVTLSDLQPGVQYNITIYAVEENQESTPVVIQQETTGTPRSDTVPSPRDLQFVEVTDVKVTIMWTPPESAVTGYRVDVIPVNLPGEHGQRLPISRNTFAEVTGLSPGVTYYFKVFAVSHGRESKPLTAQQTTKLDAPTNLQFVNETDSTVLVRWTPPRAQITGYRLTVGLTRRGQPRQYNVGPSVSKYPLRNLQPASEYTVSLVAIKGNQESPKATGVFTTLQPGSSIPPYNTEVTETTIVITWTPAPRIGFKLGVRPSQGGEAPREVTSDSGSIVVSGLTPGVEYVYTIQVLRDGQERDAPIVNKVVTPLSPPTNLHLEANPDTGVLTVSWERSTTPDITGYRITTTPTNGQQGNSLEEVVHADQSSCTFDNLSPGLEYNVSVYTVKDDKESVPISDTIIPAVPPPTDLRFTNIGPDTMRVTWAPPPSIDLTNFLVRYSPVKNEEDVAELSISPSDNAVVLTNLLPGTEYVVSVSSVYEQHESTPLRGRQKTGLDSPTGIDFSDITANSFTVHWIAPRATITGYRIRHHPEHFSGRPREDRVPHSRNSITLTNLTPGTEYVVSIVALNGREESPLLIGQQSTVSDVPRDLEVVAATPTSLLISWDAPAVTVRYYRITYGETGGNSPVQEFTVPGSKSTATISGLKPGVDYTITVYAVTGRGDSPASSKPISINYRTEIDKPSQMQVTDVQDNSISVKWLPSSSPVTGYRVTTTPKNGPGPTKTKTAGPDQTEMTIEGLQPTVEYVVSVYAQNPSGESQPLVQTAVTNIDRPKGLAFTDVDVDSIKIAWESPQGQVSRYRVTYSSPEDGIHELFPAPDGEEDTAELQGLRPGSEYTVSVVALHDDMESQPLIGTQSTAIPAPTDLKFTQVTPTSLSAQWTPPNVQLTGYRVRVTPKEKTGPMKEINLAPDSSSVVVSGLMVATKYEVSVYALKDTLTSRPAQGVVTTLENVSPPRRARVTDATETTITISWRTKTETITGFQVDAVPANGQTPIQRTIKPDVRSYTITGLQPGTDYKIYLYTLNDNARSSPVVIDASTAIDAPSNLRFLATTPNSLLVSWQPPRARITGYIIKYEKPGSPPREVVPRPRPGVTEATITGLEPGTEYTIYVIALKNNQKSEPLIGRKKTDELPQLVTLPHPNLHGPEILDVPSTVQKTPFVTHPGYDTGNGIQLPGTSGQQPSVGQQMIFEEHGFRRTTPPTTATPIRHRPRPYPPNVGQEALSQTTISWAPFQDTSEYIISCHPVGTDEEPLQFRVPGTSTSATLTGLTRGATYNIIVEALKDQQRHKVREEVVTVGNSVNEGLNQPTDDSCFDPYTVSHYAVGDEWERMSESGFKLLCQCLGFGSGHFRCDSSRWCHDNGVNYKIGEKWDRQGENGQMMSCTCLGNGKGEFKCDPHEATCYDDGKTYHVGEQWQKEYLGAICSCTCFGGQRGWRCDNCRRPGGEPSPEGTTGQSYNQYSQRYHQRTNTNVNCPIECFMPLDVQADREDSRE

SEQ ID NO: 95 - protein, 1366 aa, Homo sapiens
MLSFVDTRTLLLLAVTLCLATCQSLQEETVRKGPAGDRGPRGERGPPGPPGRDGEDGPTGPPGPPGPPGPPGLGGNFAAQYDGKGVGLGPGPMGLMGPRGPPGAAGAPGPQGFQGPAGEPGEPGQTGPAGARGPAGPPGKAGEDGHPGKPGRPGERGVVGPQGARGFPGTPGLPGFKGIRGHNGLDGLKGQPGAPGVKGEPGAPGENGTPGQTGARGLPGERGRVGAPGPAGARGSDGSVGPVGPAGPIGSAGPPGFPGAPGPKGEIGAVGNAGPAGPAGPRGEVGLPGLSGPVGPPGNPGANGLTGAKGAAGLPGVAGAPGLPGPRGIPGPVGAAGATGARGLVGEPGPAGSKGESGNKGEPGSAGPQGPPGPSGEEGKRGPNGEAGSAGPPGPPGLRGSPGSRGLPGADGRAGVMGPPGSRGASGPAGVRGPNGDAGRPGEPGLMGPRGLPGSPGNIGPAGKEGPVGLPGIDGRPGPIGPAGARGEPGNIGFPGPKGPTGDPGKNGDKGHAGLAGARGAPGPDGNNGAQGPPGPQGVQGGKGEQGPAGPPGFQGLPGPSGPAGEVGKPGERGLHGEFGLPGPAGPRGERGPPGESGAAGPTGPIGSRGPSGPPGPDGNKGEPGVVGAVGTAGPSGPSGLPGERGAAGIPGGKGEKGEPGLRGEIGNPGRDGARGAHGAVGAPGPAGATGDRGEAGAAGPAGPAGPRGSPGERGEVGPAGPNGFAGPAGAAGQPGAKGERGAKGPKGENGVVGPTGPVGAAGPAGPNGPPGPAGSRGDGGPPGMTGFPGAAGRTGPPGPSGISGPPGPPGPAGKEGLRGPRGDQGPVGRTGEVGAVGPPGFAGEKGPSGEAGTAGPPGTPGPQGLLGAPGILGLPGSRGERGLPGVAGAVGEPGPLGIAGPPGARGPPGAVGSPGVNGAPGEAGRDGNPGNDGPPGRDGQPGHKGERGYPGNIGPVGAAGAPGPHGPVGPAGKHGNRGETGPSGPVGPAGAVGPRGPSGPQGIRGDKGEPGEKGPRGLPGLKGHNGLQGLPGIAGHHGDQGAPGSVGPAGPRGPAGPSGPAGKDGRTGHPGTVGPAGIRGPQGHQGPAGPPGPPGPPGPPGVSGGGYDFGYDGDFYRADQPRSAPSLRPKDYEVDATLKSLNNQIETLLTPEGSRKNPARTCRDLRLSHPEWSSGYYWIDPNQGCTMDAIKVYCDFSTGETCIRAQPENIPAKNWYRSSKDKKHVWLGETINAGSQFEYNVEGVTSKEMATQLAFMRLLANYASQNITYHCKNSIAYMDEETGNLKKAVILQGSNDVELVAEGNSRFTYTVLVDGCSKKTNEWGKTIIEYKTNKPSRLPFLDIAPLDIGGADHEFFVDIGPVCFK

SEQ ID NO: 96 - protein, 105 aa, Homo sapiens
MAKISSPTETERCIESLIAVFQKYAGKDGYNYTLSKTEFLSFMNTELAAFTKNQKDPGVLDRMMKKLDTNSDGQLDFSEFLNLIGGLAMACHDSFLKAVPSQKRT

SEQ ID NO: 97 - protein, 283 aa, Homo sapiens
MVNYAWAGRSQRKLWWRSVAVLTCKSVVRPGYRGGLQARRSTLLKTCARARATAPGAMKMVAPWTRFYSNSCCLCCHVRTGTILLGVWYLIINAVVLLILLSALADPDQYNFSSSELGGDFEFMDDANMCIAIAISLLMILICAMATYGAYKQRAAWIIPFFCYQIFDFALNMLVAITVLIYPNSIQEYIRQLPPNFPYRDDVMSVNPTCLVLIILLFISIILTFKGYLISCVWNCYRYINGRNSSDVLVYVTSNDTTVLLPPYDDATVNGAAKEPPPPYVSA

SEQ ID NO: 98 - protein, 712 aa, Homo sapiens
MAGGPGPGEPAAPGAQHFLYEVPPWVMCRFYKVMDALEPADWCQFAALIVRDQTELRLCERSGQRTASVLWPWINRNARVADLVHILTHLQLLRARDIITAWHPPAPLPSPGTTAPRPSSIPAPAEAEAWSPRKLPSSASTFLSPAFPGSQTHSGPELGLVPSPASLWPPPPSPAPSSTKPGPESSVSLLQGARPSPFCWPLCEISRGTHNFSEELKIGEGGFGCVYRAVMRNTVYAVKRLKENADLEWTAVKQSFLTEVEQLSRFRHPNIVDFAGYCAQNGFYCLVYGFLPNGSLEDRLHCQTQACPPLSWPQRLDILLGTARAIQFLHQDSPSLIHGDIKSSNVLLDERLTPKLGDFGLARFSRFAGSSPSQSSMVARTQTVRGTLAYLPEEYIKTGRLAVDTDTFSFGVVVLETLAGQRAVKTHGARTKYLKDLVEEEAEEAGVALRSTQSTLQAGLAADAWAAPIAMQIYKKHLDPRPGPCPPELGLGLGQLACCCLHRRAKRRPPMTQVYERLEKLQAVVAGVPGHLEAASCIPPSPQENSYVSSTGRAHSGAAPWQPLAAPSGASAQAAEQLQRGPNQPVESDESLGGLSAALRSWHLTPSCPLDPAPLREAGCPQGDTAGESSWGSGPGSRPTAVEGLALGSSASSSSEPPQIIINPARQKMVQKLALYEDGALDSLQLLSSSSLPGLGLEQDRQGPEESDEFQS

SEQ ID NO: 99 - protein, 132 aa, Homo sapiens
MNHIVQTFSPVNSGQPPNYEMLKEEQEVAMLGGPHNPAPPTSTVIHIRSETSVPDHVVWSLFNTLFMNTCCLGFIAFAYSVKSRDRKMVGDVTGAQAYASTAKCLNIWALILGIFMTILLVIIPVLVVQAQR

SEQ ID NO: 100 - protein, 207 aa, Homo sapiens
MAPFEPLASGILLLLWLIAPSRACTCVPPHPQTAFCNSDLVIRAKFVGTPEVNQTTLYQRYEIKMTKMYKGFQALGDAADIRFVYTPAMESVCGYFHRSHNRSEEFLIAGKLQDGLLHITTCSFVAPWNSLSLAQRRGFTKTYTVGCEECTVFPCLSIPCKLQSGTHCLWTDQLLQGSEKGFQSRHLACLPREPGLCTWQSLRSQIA

SEQ ID NO: 101 - protein, 282 aa, Homo sapiens
MERPSLRALLLGAAGLLLLLLPLSSSSSSDTCGPCEPASCPPLPPLGCLLGETRDACGCCPMCARGEGEPCGGGGAGRGYCAPGMECVKSRKRRKGKAGAAAGGPGVSGVCVCKSRYPVCGSDGTTYPSGCQLRAASQRAESRGEKAITQVSKGTCEQGPSIVTPPKDIWNVTGAQVYLSCEVIGIPTPVLIWNKVKRGHYGVQRTELLPGDRDNLAIQTRGGPEKHEVTGWVLVSPLSKEDAGEYECHASNSQGQASASAKITVVDALHEIPVKKGEGAEL

SEQ ID NO: 102 - protein, 125 aa, Homo sapiens
MHKEEHEVAVLGAPPSTILPRSTVINIHSETSVPDHVVWSLFNTLFLNWCCLGFIAFAYSVKSRDRKMVGDVTGAQAYASTAKCLNIWALILGILMTIGFILLLVFGSVTVYHIMLQIIQEKRGY

SEQ ID NO: 103 - protein, 1466 aa, Homo sapiens
MMSFVQKGSWLLLALLHPTIILAQQEAVEGGCSHLGQSYADRDVWKPEPCQICVCDSGSVLCDDIICDDQELDCPNPEIPFGECCAVCPQPPTAPTRPPNGQGPQGPKGDPGPPGIPGRNGDPGIPGQPGSPGSPGPPGICESCPTGPQNYSPQYDSYDVKSGVAVGGLAGYPGPAGPPGPPGPPGTSGHPGSPGSPGYQGPPGEPGQAGPSGPPGPPGAIGPSGPAGKDGESGRPGRPGERGLPGPPGIKGPAGIPGFPGMKGHRGFDGRNGEKGETGAPGLKGENGLPGENGAPGPMGPRGAPGERGRPGLPGAAGARGNDGARGSDGQPGPPGPPGTAGFPGSPGAKGEVGPAGSPGSNGAPGQRGEPGPQGHAGAQGPPGPPGINGSPGGKGEMGPAGIPGAPGLMGARGPPGPAGANGAPGLRGGAGEPGKNGAKGEPGPRGERGEAGIPGVPGAKGEDGKDGSPGEPGANGLPGAAGERGAPGFRGPAGPNGIPGEKGPAGERGAPGPAGPRGAAGEPGRDGVPGGPGMRGMPGSPGGPGSDGKPGPPGSQGESGRPGPPGPSGPRGQPGVMGFPGPKGNDGAPGKNGERGGPGGPGPQGPPGKNGETGPQGPPGPTGPGGDKGDTGPPGPQGLQGLPGTGGPPGENGKPGEPGPKGDAGAPGAPGGKGDAGAPGERGPPGLAGAPGLRGGAGPPGPEGGKGAAGPPGPPGAAGTPGLQGMPGERGGLGSPGPKGDKGEPGGPGADGVPGKDGPRGPTGPIGPPGPAGQPGDKGEGGAPGLPGIAGPRGSPGERGETGPPGPAGFPGAPGQNGEPGGKGERGAPGEKGEGGPPGVAGPPGGSGPAGPPGPQGVKGERGSPGGPGAAGFPGARGLPGPPGSNGNPGPPGPSGSPGKDGPPGPAGNTGAPGSPGVSGPKGDAGQPGEKGSPGAQGPPGAPGPLGIAGITGARGLAGPPGMPGPRGSPGPQGVKGESGKPGANGLSGERGPPGPQGLPGLAGTAGEPGRDGNPGSDGLPGRDGSPGGKGDRGENGSPGAPGAPGHPGPPGPVGPAGKSGDRGESGPAGPAGAPGPAGSRGAPGPQGPRGDKGETGERGAAGIKGHRGFPGNPGAPGSPGPAGQQGAIGSPGPAGPRGPVGPSGPPGKDGTSGHPGPIGPPGPRGNRGERGSEGSPGHPGQPGPPGPPGAPGPCCGGVGAAAIAGIGGEKAGGFAPYYGDEPMDFKINTDEIMTSLKSVNGQIESLISPDGSRKNPARNCRDLKFCHPELKSGEYWVDPNQGCKLDAIKVFCNMETGETCISANPLNVPRKHWWTDSSAEKKHVWFGESMDGGFQFSYGNPELPEDVLDVQLAFLRLLSSRASQNITYHCKNSIAYMDQASGNVKKALKLMGSNEGEFKAEGNSKFTYTVLEDGCTKHTGEWSKTVFEYRTRKAVRLPIVDIAPYDIGGPDQEFGVDVGPVCFL

SEQ ID NO: 104 - protein, 272 aa, Homo sapiens
MVLLTAVLLLLAAYAGPAQSLGSFVHCEPCDEKALSMCPPSPLGCELVKEPGCGCCMTCALAEGQSCGVYTERCAQGLRCLPRQDEEKPLHALLHGRGVCLNEKSYREQVKIERDSREHEEPTTSEMAEETYSPKIFRPKHTRISELKAEAVKKDRRKKLTQSKFVGGAENTAHPRIISAPEMRQESEQGPCRRHMEASLQELKASPRMVPRAVYLPNCDRKGFYKRKQCKPSRGRKRGICWCVDKYGMKLPGMEYVDGDFQCHTFDSSNVE

SEQ ID NO: 105 - protein, 158 aa, Homo sapiens
MASRSMRLLLLLSCLAKTGVLGDIIMRPSCAPGWFYHKSNCYGYFRKLRNWSDAELECQSYGNGAHLASILSLKEASTIAEYISGYQRSQPIWIGLHDPQKRQQWQWIDGAMYLYRSWSGKSMGGNKHCAEMSSNNNFLTWSSNECNKRQHFLCKYRP

SEQ ID NO: 106 - protein, 175 aa, Homo sapiens
MEKIPVSAFLLLVALSYTLARDTTVKPGAKKDTKDSRPKLPQTLSRGWGDQLIWTQTYEEALYKSKTSNKPLMIIHHLDECPHSQALKKVFAENKEIQKLAEQFVLLNLVYETTDKHLSPDGQYVPRIMFVDPSLTVRADITGRYSNRLYAYEPADTALLLDNMKKALKLLKTEL

SEQ ID NO: 107 - protein, 732 aa, Homo sapiens
MPEETQTQDQPMEEEEVETFAFQAEIAQLMSLIINTFYSNKEIFLRELISNSSDALDKIRYESLTDPSKLDSGKELHINLIPNKQDRTLTIVDTGIGMTKADLINNLGTIAKSGTKAFMEALQAGADISMIGQFGVGFYSAYLVAEKVTVITKHNDDEQYAWESSAGGSFTVRTDTGEPMGRGTKVILHLKEDQTEYLEERRIKEIVKKHSQFIGYPITLFVEKERDKEVSDDEAEEKEDKEEEKEKEEKESEDKPEIEDVGSDEEEEKKDGDKKKKKKIKEKYIDQEELNKTKPIWTRNPDDITNEEYGEFYKSLTNDWEDHLAVKHFSVEGQLEFRALLFVPRRAPFDLFENRKKKNNIKLYVRRVFIMDNCEELIPEYLNFIRGVVDSEDLPLNISREMLQQSKILKVIRKNLVKKCLELFTELAEDKENYKKFYEQFSKNIKLGIHEDSQNRKKLSELLRYYTSASGDEMVSLKDYCTRMKENQKHIYYITGETKDQVANSAFVERLRKHGLEVIYMIEPIDEYCVQQLKEFEGKTLVSVTKEGLELPEDEEEKKKQEEKKTKFENLCKIMKDILEKKVEKVVVSNRLVTSPCCIVTSTYGWTANMERIMKAQALRDNSTMGYMAAKKHLEINPDHSIIETLRQKAEADKNDKSVKDLVILLYETALLSSGFSLEDPQTHANRIYRMIKLGLGIDEDDPTADDTSAAVTEEMPPLEGDDDTSRMEEVD

SEQ ID NO: 108 - protein, 1361 aa, Homo sapiens
MGAAGRQDFLFKAMLTISWLTLTCFPGATSTVAAGCPDQSPELQPWNPGHDQDHHVHIGQGKTLLLTSSATVYSIHISEGGKLVIKDHDEPIVLRTRHILIDNGGELHAGSALCPFQGNFTIILYGRADEGIQPDPYYGLKYIGVGKGGALELHGQKKLSWTFLNKTLHPGGMAEGGYFFERSWGHRGVIVHVIDPKSGTVIHSDRFDTYRSKKESERLVQYLNAVPDGRILSVAVNDEGSRNLDDMARKAMTKLGSKHFLHLGFRHPWSFLTVKGNPSSSVEDHIEYHGHRGSAAARVFKLFQTEHGEYFNVSLSSEWVQDVEWTEWFDHDKVSQTKGGEKISDLWKAHPGKICNRPIDIQATTMDGVNLSTEVVYKKGQDYRFACYDRGRACRSYRVRFLCGKPVRPKLTVTIDTNVNSTILNLEDNVQSWKPGDTLVIASTDYSMYQAEEFQVLPCRSCAPNQVKVAGKPMYLHIGEEIDGVDMRAEVGLLSRNIIVMGEMEDKCYPYRNHICNFFDFDTFGGHIKFALGFKAAHLEGTELKHMGQQLVGQYPIHFHLAGDVDERGGYDPPTYIRDLSIHHTFSRCVTVHGSNGLLIKDVVGYNSLGHCFFTEDGPEERNTFDHCLGLLVKSGTLLPSDRDSKMCKMITEDSYPGYIPKPRQDCNAVSTFWMANPNNNLINCAAAGSEETGFWFIFHHVPTGPSVGMYSPGYSEHIPLGKFYNNRAHSNYRAGMIIDNGVKTTEASAKDKRPFLSIISARYSPHQDADPLKPREPAIIRHFIAYKNQDHGAWLRGGDVWLDSCRFADNGIGLTLASGGTFPYDDGSKQEIKNSLFVGESGNVGTEMMDNRIWGPGGLDHSGRTLPIGQNFPIRGIQLYDGPINIQNCTFRKFVALEGRHTSALAFRLNNAWQSCPHNNVTGIAFEDVPITSRVFFGEPGPWFNQLDMDGDKTSVFHDVDGSVSEYPGSYLTKNDNWLVRHPDCINVPDWRGAICSGCYAQMYIQAYKTSNLRMKIIKNDFPSHPLYLEGALTRSTHYQQYQPVVTLQKGYTIHWDQTAPAELAIWLINFNKGDWIRVGLCYPRGTTFSILSDVHNRLLKQTSKTGVFVRTLQMDKVEQSYPGRSHYYWDEDSGLLFLKLKAQNEREKFAFCSMKGCERIKIKALIPKNAGVSDCTATAYPKFTERAVVDVPMPKKLFGSQLKTKDHFLEVKMESSKQHFFHLWNDFAYIEVDGKKYPSSEDGIQVVVIDGNQGRVVSHTSFRNSILQGIPWQLFNYVATIPDNSIVLMASKGRYVSRGPWTRVLEKLGADRGLKLKEQMAFVGFKGSFRPIWVTLDTEDHKAKIFQVVPIPVVKKKKL

SEQ ID NO: 109 - protein, 469 aa, Homo sapiens
MHSFPPLLLLLFWGVVSHSFPATLETQEQDVDLVQKYLEKYYNLKNDGRQVEKRRNSGPVVEKLKQMQEFFGLKVTGKPDAETLKVMKQPRCGVPDVAQFVLTEGNPRWEQTHLTYRIENYTPDLPRADVDHAIEKAFQLWSNVTPLTFTKVSEGQADIMISFVRGDHRDNSPFDGPGGNLAHAFQPGPGIGGDAHFDEDERWTNNFREYNLHRVAAHELGHSLGLSHSTDIGALMYPSYTFSGDVQLAQDDIDGIQAIYGRSQNPVQPIGPQTPKACDSKLTFDAITTIRGEVMFFKDRFYMRTNPFYPEVELNFISVFWPQLPNGLEAAYEFADRDEVRFFKGNKYWAVQGQNVLHGYPKDIYSSFGFPRTVKHIDAALSEENTGKTYFFVANKYWRYDEYKRSMDPGYPKMIAHDFPGIGHKVDAVFMKDGFFYFFHGTRQYKFDPKTKRILTLQKANSWFNCRKN

SEQ ID NO: 110 - protein, 267 aa, Homo sapiens
MRLTVLCAVCLLPGSLALPLPQEAGGMSELQWEQAQDYLKRFYLYDSETKNANSLEAKLKEMQKFFGLPITGMLNSRVIEIMQKPRCGVPDVAEYSLFPNSPKWTSKVVTYRIVSYTRDLPHITVDRLVSKALNMWGKEIPLHFRKVVWGTADIMIGFARGAHGDSYPFDGPGNTLAHAFAPGTGLGGDAHFDEDERWTDGSSLGINFLYAATHELGHSLGMGHSSDPNAVMYPTYGNGDPQNFKLSQDDIKGIQKLYGKRSNSRKK

SEQ ID NO: 111 - protein, 216 aa, Homo sapiens
MRPRSGPTRNPRLRAFAGVPTRGRTRGQSRRCAAEASAGPERDARPGAPAAGTMGAAHSASEEVRELEGKTGFSSDQIEQLHRRFKQLSGDQPTIRKENFNNVPDLELNPIRSKIVRAFFDNRNLRKGPSGLADEINFEDFLTIMSYFRPIDTTMDEEQVELSRKEKLRFLFHMYDSDSDGRITLEEYRNVKWSRSCCRETLTSRRSPLAPSPTGP

SEQ ID NO: 112 - protein, 422 aa, Homo sapiens [sequence omitted]

SEQ ID NO: 113 - protein, 398 aa, Homo sapiens
MMLKGITRLISRIHKLDPGRFLHMGTQARQSIAAHLDNQVPVESPRAISRTNENDPAKHGDQHEGQHYNISPQDLETVFPHGLPPRFVMQVKTFSEACLMVRKPALELLHYLKNTSFAYPAIRYLLYGEKGTGKTLSLCHVIHFCAKQDWLILHIPDAHLWVKNCRDLLQSSYNKQRFDQPLEASTWLKNFKTTNERFLNQIKVQEKYVWNKRESTEKGSPLGEVVEQGITRVRNATDAVGIVLKELKRQSSLGMFHLLVAVDGINALWGRTTLKREDKSPIAPEELALVHNLRKMMKNDWHGGAIVSALSQTGSLFKPRKAYLPQELLGKEGFDALDPFIPILVSNYNPKEFESCIQYYLENNWLQHEKAPTEEGKKELLFLSNANPSLLERHCAYL

SEQ ID NO: 114 - protein, 75 aa, Homo sapiens
MLSHFRVKVKGFILISKYFDPYDLVSSYPKYGPHTSRTGILWELVRNVESLVLRFSKSESAFSSALLAIHMFEKD

SEQ ID NO: 115 - protein, 163 aa, Homo sapiens
MSESGFKLLCQCLGFGSGHFRCDSSRWCHDNGVNYKIGEKWDRQGENGQMMSCTCLGNGKGEFKCDPHEATCYDDGKTYHVGEQWQKEYLGAICSCTCFGGQRGWRCDNCRRPGGEPSPEGTTGQSYNQYSQRYHQRTNTNVNCPIECFMPLDVQADREDSRE

SEQ ID NO: 116 - protein, 483 aa, Homo sapiens
MSIRVTQKSYKVSTSGPRAFSSRSYTSGPGSRISSSSFSRVGSSNFRGGLGGGYGGASGMGGITAVTVNQSLLSPLVLEVDPNIQAVRTQEKEQIKTLNNKFASFIDKVRFLEQQNKMLETKWSLLQQQKTARSNMDNMFESYINNLRRQLETLGQEKLKLEAELGNMQGLVEDFKNKYEDEINKRTEMENEFVLIKKDVDEAYMNKVELESRLEGLTDEINFLRQLYEEEIRELQSQISDTSVVLSMDNSRSLDMDSIIAEVKAQYEDIANRSRAEAESMYQIKYEELQSLAGKHGDDLRRTKTEISEMNRNISRLQAEIEGLKGQRASLEAAIADAEQRGELAIKDANAKLSELEAALQRAKQDMARQLREYQELMNVKLALDIEIATYRKLLEGEESRLESGMQNMSIHTKTTSGYAGGLSSAYGGLTSPGLSYSLGSSFGSGAGSSSFSRTSSSRAVVVKKIETRDGKLVSESSDVLPK

SEQ ID NO: 117 - protein, 430 aa, Homo sapiens
MSFTTRSTFSTNYRSLGSVQAPSYGARPVSSAASVYAGAGGSGSRISVSRSTSFRGGMGSGGLATGIAGGLAGMGGIQNEKETMQSLNDRLASYLDRVRSLETENRRLESKIREHLEKKGPQVRDWSHYFKIIEDLRAQIFANTVDNARIVLQIDNARLAADDFRVKYETELAMRQSVENDIHGLRKVIDDTNITRLQLETEIEALKEELLFMKKNHEEEVKGLQAQIASSGLTVEVDAPKSQDLAKIMADIRAQYDELARKNREELDKYWSQQIEESTTVVTTQSAEVGAAETTLTELRRTVQSLEIDLDSMRNLKASLENSLREVEARYALQMEQLNGILLHLESELAQTRAEGQRQAQEYEALLNIKVKLEAEIATYRRLLEDGEDFNLGDALDSSNSMQTIQKTTTRRIVDGKVVSETNDTKVLRH

SEQ ID NO: 118 - protein, 400 aa, Homo sapiens
MTSYSYRQSSATSSFGGLGGGSVRFGPGVAFRAPSIHGGSGGRGVSVSSARFVSSSSSGAYGGGYGGVLTASDGLLAGNEKLTMQNLNDRLASYLDKVRALEAANGELEVKIRDWYQKQGPGPSRDYSHYYTTIQDLRDKILGATIENSRIVLQIDNARLAADDFRTKFETEQALRMSVEADINGLRRVLDELTLARTDLEMQIEGLKEELAYLKKNHEEEISTLRGQVGGQVSVEVDSAPGTDLAKILSDMRSQYEVMAEQNRKDAEAWFTSRTEELNREVAGHTEQLQMSRSEVTDLRRTLQGLEIELQSQLSMKAALEDTLAETEARFGAQLAHIQALISGIEAQLGDVRADSERQNQEYQRLMDIKSRLEQEIATYRSLLEGQEDHYNNLSASKVL

SEQ ID NO: 119 - protein, 424 aa, Homo sapiens
MDFSRRSFHRSLSSSLQAPVVSTVGMQRLGTTPSVYGGAGGRGIRISNSRHTVNYGSDLTGGGDLFVGNEKMAMQNLNDRLASYLEKVRTLEQSNSKLEVQIKQWYETNAPRAGRDYSAYYRQIEELRSQIKDAQLQNARCVLQIDNAKLAAEDFRLKYETERGIRLTVEADLQGLNKVFDDLTLHKTDLEIQIEELNKDLALLKKEHQEEVDGLHKHLGNTVNVEVDAAPGLNLGVIMNEMRQKYEVMAQKNLQEAKEQFERQTAVLQQQVTVNTEELKGTEVQLTELRRTSQSLEIELQSHLSMKESLEHTLEETKARYSSQLANLQSLLSSLEAQLMQIRSNMERQNNEYHILLDIKTRLEQEIATYRRLLEGEDVKTTEYQLSTLEERDIKKTRKIKTVVQEVVDGKVVSSEVKEVEENI

SEQ ID NO: 120 - protein, 1255 aa, Homo sapiens
MTPGTQSPFFLLLLLTVLTVVTGSGHASSTPGGEKETSATQRSSVPSSTEKNAVSMTSSVLSSHSPGSGSSTTQGQDVTLAPATEPASGSAATWGQDVTSVPVTRPALGSTTPPAHDVTSAPDNKPAPGSTAPPAHGVTSAPDTRPAPGSTAPPAHGVTSAPDTRPAPGSTAPPAHGVTSAPDTRPAPGSTAPPAHGVTSAPDTRPAPGSTAPPAHGVTSAPDTRPAPGSTAPPAHGVTSAPDTRPAPGSTAPPAHGVTSAPDTRPAPGSTAPPAHGVTSAPDTRPAPGSTAPPAHGVTSAPDTRPAPGSTAPPAHGVTSAPDTRPAPGSTAPPAHGVTSAPDTRPAPGSTAPPAHGVTSAPDTRPAPGSTAPPAHGVTSAPDTRPAPGSTAPPAHGVTSAPDTRPAPGSTAPPAHGVTSAPDTRPAPGSTAPPAHGVTSAPDTRPAPGSTAPPAHGVTSAPDTRPAPGSTAPPAHGVTSAPDTRPAPGSTAPPAHGVTSAPDTRPAPGSTAPPAHGVTSAPDTRPAPGSTAPPAHGVTSAPDTRPAPGSTAPPAHGVTSAPDTRPAPGSTAPPAHGVTSAPDTRPAPGSTAPPAHGVTSAPDTRPAPGSTAPPAHGVTSAPDTRPAPGSTAPPAHGVTSAPDTRPAPGSTAPPAHGVTSAPDTRPAPGSTAPPAHGVTSAPDTRPAPGSTAPPAHGVTSAPDTRPAPGSTAPPAHGVTSAPDTRPAPGSTAPPAHGVTSAPDTRPAPGSTAPPAHGVTSAPDTRPAPGSTAPPAHGVTSAPDTRPAPGSTAPPAHGVTSAPDTRPAPGSTAPPAHGVTSAPDTRPAPGSTAPPAHGVTSAPDTRPAPGSTAPPAHGVTSAPDTRPAPGSTAPPAHGVTSAPDTRPAPGSTAPPAHGVTSAPDTRPAPGSTAPPAHGVTSAPDTRPAPGSTAPPAHGVTSAPDNRPALGSTAPPVHNVTSASGSASGSASTLVHNGTSARATTTPASKSTPFSIPSHHSDTPTTLASHSTKTDASSTHHSSVPPLTSSNHSTSPQLSTGVSFFFLSFHISNLQFNSSLEDPSTDYYQELQRDISEMFLQIYKQGGFLGLSNIKFRPGSVVVQLTLAFREGTINVHDVETQFNQYKTEAASRYNLTISDVSVSDVPFPFSAQSGAGVPGWGIALLVLVCVLVALAIVYLIALAVCQCRRKNYGQLDIFPARDTYHPMSEYPTYHTHGRYVPPSSTDRSPYEKVSAGNGGSSLSYTNPAVAAASANL

SEQ ID NO: 121 - protein, 5179 aa, Homo sapiens
MGLPLARLAAVCLALSLAGGSELQTEGRTRYHGRNVCSTWGNFHYKTFDGDVFRFPGLCDYNFASDCRGSYKEFAVHLKRGPGQAEAPAGVESILLTIKDDTIYLTRHLAVLNGAVVSTPHYSPGLLIEKSDAYTKVYSRAGLTLMWNREDALMLELDTKFRNHTCGLCGDYNGLQSYSEFLSDGVLFSPLEFGNMQKINQPDVVCEDPEEEVAPASCSEHRAECERLLTAEAFADCQDLVPLEPYLRACQQDRCRCPGGDTCVCSTVAEFSRQCSHAGGRPGNWRTATLCPKTCPGNLVYLESGSPCMDTCSHLEVSSLCEEHRMDGCFCPEGTVYDDIGDSGCVPVSQCHCRLHGHLYTPGQEITNDCEQCVCNAGRWVCKDLPCPGTCALEGGSHITTFDGKTYTFHGDCYYVLAKGDHNDSYALLGELAPCGSTDKQTCLKTVVLLADKKKNAVVFKSDGSVLLNQLQVNLPHVTASFSVFRPSSYHIMVSMAIGVRLQVQLAPVMQLFVTLDQASQGQVQGLCGNFNGLEGDDFKTASGLVEATGAGFANTWKAQSTCHDKLDWLDDPCSLNIESANYAEHWCSLLKKTETPFGRCHSAVDPAEYYKRCKYDTCNCQNNEDCLCAALSSYARACTAKGVMLWGWREHVCNKDVGSCPNSQVFLYNLTTCQQTCRSLSEADSHCLEGFAPVDGCGCPDHTFLDEKGRCVPLAKCSCYHRGLYLEAGDVVVRQEERCVCRDGRLHCRQIRLIGQSCTAPKIHMDCSNLTALATSKPRALSCQTLAAGYYHTECVSGCVCPDGLMDDGRGGCVVEKECPCVHNNDLYSSGAKIKVDCNTCTCKRGRWVCTQAVCHGTCSIYGSGHYITFDGKYYDFDGHCSYVAVQDYCGQNSSLGSFSIITENVPCGTTGVTCSKAIKIFMGRTELKLEDKHRVVIQRDEGHHVAYTTREVGQYLVVESSTGIIVIWDKRTTVFIKLAPSYKGTVCGLCGNFDHRSNNDFTTRDHMVVSSELDFGNSWKEAPTCPDVSTNPEPCSLNPHRRSWAEKQCSILKSSVFSICHSKVDPKPFYEACVHDSCSCDTGGDCECFCSAVASYAQECTKEGACVFWRTPDLCPIFCDYYNPPHECEWHYEPCGNRSFETCRTINGIHSNISVSYLEGCYPRCPKDRPIYEEDLKKCVTADKCGCYVEDTHYPPGASVPTEETCKSCVCTNSSQVVCRPEEGKILNQTQDGAFCYWEICGPNGTVEKHFNICSITTRPSTLTTFTTITLPTTPTSFTTTTTTTTPTSSTVLSTTPKLCCLWSDWINEDHPSSGSDDGDREPFDGVCGAPEDIECRSVKDPHLSLEQHGQKVQCDVSVGFICKNEDQFGNGPFGLCYDYKIRVNCCWPMDKCITTPSPPTTTPSPPPTTTTTLPPTTTPSPPTTTTTTPPPTTTPSPPITTTTTPLPTTTPSPPISTTTTPPPTTTPSPPTTTPSPPTTTPSPPTTTTTTPPPTTTPSPPMTTPITPPASTTTLPPTTTPSPPTTTTTTPPPTTTPSPPTTTPITPPTSTTTLPPTTTPSPPPTTTTTPPPTTTPSPPTTTTPSPPTITTTTPPPTTTPSPPTTTTTTPPPTTTPSPPTTTPITPPTSTTTLPPTTTPSPPPTTTTTPPPTTTPSPPTTTTPSPPITTTTTPPPTTTPSSPITTTPSPPTTTMTTPSPTTTPSSPITTTTTPSSTTTPSPPPTTMTTPSPTTTPSPPTTTMTTLPPTTTSSPLTTTPLPPSITPPTFSPFSTTTPTTPCVPLCNWTGWLDSGKPNFHKPGGDTELIGDVCGPGWAANISCRATMYPDVPIGQLGQTVVCDVSVGLICKNEDQKPGGVIPMAFCLNYEINVQCCECVTQPTTMTTTTTENPTPPTTTPITTTTTVTPTPTPTGTQTPTTTPITTTTTVTPTPTPTGTQTPTTTPITTTTTVTPTPTPTGTQTPTTTPITTTTTVTPTPTPTGTQTPTTTPITTTTTVTPTPTPTGTQTPTTTPITTTTTVTPTPTPTGTQTPTTTPITTTTTVTPTPTPTGTQTPTTTPITTTTTVTPTPTPTGTQTPTTTPITTTTTVTPTPTPTGTQTPTTTPITTTTTVTPTPTPTGTQTPTTTPITTTTTVTPTPTPTGTQTPTTTPITTTTTVTPTPTPTGTQTPTTTPITTTTTVTPTPTPTGTQTPTTTPITTTTTVTPTPTPTGTQTPTTTPITTTTTVTPTPTPTGTQTPTTTPITTTTTVTPTPTPTGTQTPTTTPITTTTTVTPTPTPTGTQTPTTTPITTTTTVTPTPTPTGTQTPTTTPITTTTTVTPTPTPTGTQTPTTTPITTTTTVTPTPTPTGTQTPTTTPITTTTTVTPTPTPTGTQTPTTTPITTTTTVTPTPTPTGTQTPTTTPITTTTTVTPTPTPTGTQTPTTTPITTTTTVTPTPTPTGTQTPTTTPITTTTTVTPTPTPTGTQTPTTTPITTTTTVTPTPTPTGTQTPTTTPITTTTTVTPTPTPTGTQTPTTTPITTTTTVTPTPTPTGTQTPTTTPITTTTTVTPTPTPTGTQTPTTTPITTTTTVTPTPTPTGTQTPTTTPITTTTTVTPTPTPTGTQTPTTTPITTTTTVTPTPTPTGTQTPTTTPITTTTTVTPTPTPTGTQTPTTTPITTTTTVTPTPTPTGTQTPTTTPITTTTTVTPTPTPTGTQTPTTTPITTTTTVTPTPTPTGTQTPTTTPITTTTTVTPTPTPTGTQTPTTTPITTTTTVTPTPTPTGTQTPTTTPITTTTTVTPTPTPTGTQTPTTTPITTTTTVTPTPTPTGTQTPTTTPITTTTTVTPTPTPTGTQTPTTTPITTTTTVTPTPTPTGTQTPTTTPITTTTTVTPTPTPTGTQTPTTTPITTTTTVTPTPTPTGTQTPTTTPITTTTTVTPTPTPTGTQTPTTTPITTTTTVTPTPTPTGTQTPTTTPITTTTTVTPTPTPTGTQTPTTTPITTTTTVTPTPTPTGTQTPTTTPITTTTTVTPTPTPTGTQTPTTTPITTTTTVTPTPTPTGTQTPTTTPITTTTTVTPTPTPTGTQTPTTTPITTTTTVTPTPTPTGTQTPTTTPITTTTTVTPTPTPTGTQTPTTTPITTTTTVTPTPTPTGTQTPTTTPITTTTTVTPTPTPTGTQTPTTTPITTTTTVTPTPTPTGTQTPTTTPITTTTTVTPTPTPTGTQTPTTTPITTTTTVTPTPTPTGTQTPTTTPITTTTTVTPTPTPTGTQTPTTTPITTTTTVTPTPTPTGTQTPTTTPITTTTTVTPTPTPTGTQTPTTTPITTTTTVTPTPTPTGTQTPTTTPITTTTTVTPTPTPTGTQTPTTTPITTTTTVTPTPTPTGTQTPTTTPITTTTTVTPTPTPTGTQTPTTTPITTTTTVTPTPTPTGTQTPTTTPITTTTTVTPTPTPTGTQTPTTTPITTTTTVTPTPTPTGTQTPTTTPITTTTTVTPTPTPTGTQTPTTTPITTTTTVTPTPTPTGTQTPTTTPITTTTTVTPTPTPTGTQTPTTTPITTTTTVTPTPTPTGTQTPTTTPITTTTTVTPTPTPTGTQTPTTTPITTTTTVTPTPTPTGTQTPTTTPITTTTTVTPTPTPTGTQTPTTTPITTTTTVTPTPTPTGTQTPTTTPITTTTTVTPTPTPTGTQTPTTTPITTTTTVTPTPTPTGTQTPTTTPITTTTTVTPTPTPTGTQTPTTTPITTTTTVTPTPTPTGTQTPTTTPITTTTTVTPTPTPTGTQTPTTTPITTTTTVTPTPTPTGTQTPTTTPITTTTTVTPTPTPTGTQTPTTTPITTTTTVTPTPTPTGTQTPTTTPITTTTTVTPTPTPTGTQTPTTTPITTTTTVTPTPTPTGTQTPTTTPITTTTTVTPTPTPTGTQTPTTTPITTTTTVTPTPTPTGTQTPTTTPITTTTTVTPTPTPTGTQTPTTTPITTTTTVTPTPTPTGTQTPTTTPITTTTTVTPTPTPTGTQTPTTTPITTTTTVTPTPTPTGTQTPTTTPITTTTTVTPTPTPTGTQTPTTTPITTTTTVTPTPTPTGTQTPTTTPITTTTTVTPTPTPTGTQTPTTTPITTTTTVTPTPTPTGTQTPTTTPITTTTTVTPTPTPTGTQTPTTTPITTTTTVTPTPTPTGTQTPTTTPITTTTTVTPTPTPTGTQTPTTTPITTTTTVTPTPTPTGTQTGPPTHTSTAPIAELTTSNPPPESSTPQTSRSTSSPLTESTTLLSTLPPAIEMTSTAPPSTPTAPTTTSGGHTLSPPPSTTTSPPGTPTRGTTTGSSSAPTPSTVQTTTTSAWTPTPTPLSTPSIIRTTGLRPYPSSVLICCVLNDTYYAPGEEVYNGTYGDTCYFVNCSLSCTLEFYNWSCPSTPSPTPTPSKSTPTPSKPSSTPSKPTPGTKPPECPDFDPPRQENETWWLCDCFMATCKYNNTVEIVKVECEPPPMPTCSNGLQPVRVEDPDGCCWHWECDCYCTGWGDPHYVTFDGLYYSYQGNCTYVLVEEISPSVDNFGVYIDNYHCDPNDKVSCPRTLIVRHETQEVLIKTVHMMPMQVQVQVNRQAVALPYKKYGLEVYQSGINYVVDIPELGVLVSYNGLSFSVRLPYHRFGNNTKGQCGTCTNTTSDDCILPSGEIVSNCEAAADQWLVNDPSKPHCPHSSSTTKRPAVTVPGGGKTTPHKDCTPSPLCQLIKDSLFAQCHALVPPQHYYDACVFDSCFMPGSSLECASLQAYAALCAQQNICLDWRNHTHGACLVECPSHREYQACGPAEEPTCKSSSSQQNNTVLVEGCFCPEGTMNYAPGFDVCVKTCGCVGPDNVPREFGEHFEFDCKNCVCLEGGSGIICQPKRCSQKPVTHCVEDGTYLATEVNPADTCCNITVCKCNTSLCKEKPSVCPLGFEVKSKMVPGRCCPFYWCESKGVCVHGNAEYQPGSPVYSSKCQDCVCTDKVDNNTLLNVIACTHVPCNTSCSPGFELMEAPGECCKKCEQTHCIIKRPDNQHVILKPGDFKSDPKNNCTFFSCVKIHNQLISSVSNITCPNFDASICIPGSITFMPNGCCKTCTPRNETRVPCSTVPVTTEVSYAGCTKTVLMNHCSGSCGTFVMYSAKAQALDHSCSCCKEEKTSQREVVLSCPNGGSLTHTYTHIESCQCQDTVCGLPTGTSRRARRSPRHLGSG

SEQ ID NO: 122 - protein, 1217 aa, Homo sapiens
ITITETTSHSTPSYTTSITTTETPSHSTPSYTTSITTTETPSHSTPSFTSSITTTETTSHSTPSFTSSIRTTETTSYSTPSFTSSNTITETTSHSTPSYITSITTTETPSSSTPSFSSSITTTETTSHSTPGFTSSITTTETTSHSTPSFTSSITTTETTSHDTPSFTSSITTSETPSHSTPSSTSLITTTKTTSHSTPSFTSSITTTETTSHSARSFTSSITTTETTSHNTRSFTSSITTTETNSHSTTSFTSSITTTETTSHSTPSFSSSITTTETPLHSTPGLTSWVTTTKTTSHITPGLTSSITTTETTSHSTPGFTSSITTTETTSESTPSLSSSTIYSTVSTSTTAITSHFTTSETAVTPTPVTPSSLSTDIPTTSLRTLTPSSVGTSTSLTTTTDFPSIPTDISTLPTRTHIISSSPSIQSTETSSLVGTTSPTMSTVRMTLRITENTPISSFSTSIVVIPETPTQTPPVLTSATGTQTSPAPTTVTFGSTDSSTSTLHTLTPSTALSTIVSTSQVPIPSTHSSTLQTTPSTPSLQTSLTSTSEFTTESFTRGSTSTNAILTSFSTIIWSSTPTIIMSSSPSSASITPVFSTTIHSVPSSPYIFSTENVGSASITGFPSLSSSATTSTSSTSSSLTTALTEITPFSYISLPSTTPCPGTITITIVPASPTDPCVEMDPSTEATSPPTTPLTVFPFTTEMVTCPTSISIQTTLTTYMDTSSMMPESESSISPNASSSTGTGTVPTNTVFTSTRLPTSETWLSNSSVIPLPLPGVSTIPLTMKPSSSLPTILRTSSKSTHPSPPTTRTSETPVATTQTPTTLTSRRTTRITSQMTTQSTLTTTAGTCDNGGTWEQGQCACLPGFSGDRCQLQTRCQNGGQWDGLKCQCPSTFYGSSCEFAVEQVDLDVVETEVGMEVSVDQQFSPDLNDNTSQAYRDFNKTFWNQMQKIFADMQGFTFKGVEILSLRNGSIVVDYLVLLEMPFSPQLESEYEQVKTTLKEGLQNASQDVNSCQDSQTLCFKPDSIKVNNNSKTELTPAAICRRAAPTGYEEFYFPLVEATRLRCVTKCTSGVDNAIDCHQGQCVLETSGPTCRCYSTDTHWFSGPRCEVAVHWRALVGGLTAGAALLVLLLLALGVRAVRSGWWGGQRRGRSWDQDRKWFETWDEEVVGTFSNWGFEDDGTDKDTNFYVALENVDTTMKVHIKRPEMTSSSV

SEQ ID NO: 123 - protein, 1373 aa, Homo sapiens
MSVGRRKLALLWALALALACTRHTGHAQDGSSESSYKHHPALSPIARGPIGVPLRGATVFPSLRTIPVVRASNPAHNGRVCSTWGSFHYKTFDGDVFRFPGLCNYVFSEHCGAAYEDFNIPATPQPGVSGPHAEQGPHEGGWRGHPADQGLRPGQRPPGPAALQPVWGPHSARAAATPRWKPGWALSSCGTTMTACCWKLDTKYANKNLWALWGLQRDARGQRAPLPQHQADTHGIREPAERWTNPRSSVRTLSLNPRRTAPLALASCEELLHGQLFSGCVALVDVGSYLEACRQDLCFCEDTDLLSCVCHTLAEYSRQCTHAGGLPQDWRGPDFCPQKCPNNMQYHECRSPCADTCSNQEHSRACEDHCVAGCFCPEGTVLDDIGQTGCVPVSKCACVYNGAAYAPGATYSTDCTNCTCSGGRWSCQEVPCPGTCSVLGGAHFSTFDGKQYTVHGDCSYVLTKPCDSSAFTVLAELRRCGLTDSETCLKSVTLSLDGAQTVVVIKASGEVFLNQIYTQLPISAANVTIFRPSTFFIIAQTSLGLQLNLQLVPTMQLFMQLAPKLRGQTCGLCGNFNSIQADDFRTLSGVVEATAAAFFNTFKTQAACPNIRNSFEDPCSLSVENEKYAQHWCSQLTDADGPFGRCHAAVKPGTYYSNCMFDTCNCERSEDCLCAALSSYVHACAAKGVQLGGWRDGVCTKPMTTCPKSMTYHYHVSTCQPTCRSLSEGDITCSVGFIPVDGCICPKGTFLDDTGKCVQASNCPCYHRGSMIPNGESVHDSGAICTCTHGKLSCIGGQAPAPVCAAPMVFFDCRNATPGDTGAGCQKSCHTLDMTCYSPQCVPGCVCPDGLVADGEGGCITAEDCPCVHNEASYRAGQTIRVGCNTCTCDSRMWRCTDDPCLATCAVYGDGHYLTFDGQSYSFNEETASTRWCRTAVAGKTAPRTPFVLSPRTSPAAPQGPPAPRPSRFSWGNFELKLSHGKVEVIGTDESQEVPYTIRQMGIYLVVDTDIGLVLLWDKKTSIFINLSPEFKGRVCGLCGNFDDIAVNDFATRSRSVVGDVLEFGNSWKLSPSCPDALAPKDPCTANPFRKSWAQKQCSILHGPTFAACHAHVEPARYYEACVNDACACDSGGDCECFCTAVARYAQACHEVGTCVCLRTPSICPLFCDYYNPEGQCEWHYQPCGVPCLRTCRNPRGDCLRDVRGLEGCYPKCPPEAPIFDEDKMQCVATCPTPPLPPRCHVHGKSYRPGAVVPSDKNCQSCLCTERGVECTYKAEACVCTYNGQRFHPGDVIYHTTDGTGGCISARCGANGTIERRVYPCSPTTPVPPTTFSFSTPPLVVSSTHTPSNGPSSAHTGPPSSAWPTTAGTSPRT

SEQ ID NO: 124 - protein, 165 aa, Homo sapiens
MEMFQGLLLLLLLSMGGTWASKEPLRPRCRPINATLAVEKEGCPVCITVNTTICAGYCPTMTRVLQGVLPALPQVVCNYRDVRFESIRLPGCPRGVNPVVSYAVALSCQCALCRRSTTDCGGPKDHPLTCDDPRFQDSSSSKAPPPSLPSPSRLPGPSDTPILPQ

SEQ ID NO: 125 - protein, 1210 aa, Homo sapiens
MRPSGTAGAALLALLAALCPASRALEEKKVCQGTSNKLTQLGTFEDHFLSLQRMFNNCEVVLGNLEITYVQRNYDLSFLKTIQEVAGYVLIALNTVERIPLENLQIIRGNMYYENSYALAVLSNYDANKTGLKELPMRNLQEILHGAVRFSNNPALCNVESIQWRDIVSSDFLSNMSMDFQNHLGSCQKCDPSCPNGSCWGAGEENCQKLTKIICAQQCSGRCRGKSPSDCCHNQCAAGCTGPRESDCLVCRKFRDEATCKDTCPPLMLYNPTTYQMDVNPEGKYSFGATCVKKCPRNYVVTDHGSCVRACGADSYEMEEDGVRKCKKCEGPCRKVCNGIGIGEFKDSLSINATNIKHFKNCTSISGDLHILPVAFRGDSFTHTPPLDPQELDILKTVKEITGFLLIQAWPENRTDLHAFENLEIIRGRTKQHGQFSLAVVSLNITSLGLRSLKEISDGDVIISGNKNLCYANTINWKKLFGTSGQKTKIISNRGENSCKATGQVCHALCSPEGCWGPEPRDCVSCRNVSRGRECVDKCKLLEGEPREFVENSECIQCHPECLPQAMNITCTGRGPDNCIQCAHYIDGPHCVKTCPAGVMGENNTLVWKYADAGHVCHLCHPNCTYGCTGPGLEGCPTNGPKIPSIATGMVGALLLLLVVALGIGLFMRRRHIVRKRTLRRLLQERELVEPLTPSGEAPNQALLRILKETEFKKIKVLGSGAFGTVYKGLWIPEGEKVKIPVAIKELREATSPKANKEILDEAYVMASVDNPHVCRLLGICLTSTVQLITQLMPFGCLLDYVREHKDNIGSQYLLNWCVQIAKGMNYLEDRRLVHRDLAARNVLVKTPQHVKITDFGLAKLLGAEEKEYHAEGGKVPIKWMALESILHRIYTHQSDVWSYGVTVWELMTFGSKPYDGIPASEISSILEKGERLPQPPICTIDVYMIMVKCWMIDADSRPKFRELIIEFSKMARDPQRYLVIQGDERMHLPSPTDSNFYRALMDEEDMDDVVDADEYLIPQQGFFSSPSTSRTPLLSSLSATSNNSTVACIDRNGLQSCPIKEDSFLQRYSSDPTGALTEDSIDDTFLPVPEYINQSVPKRPAGSVQNPVYHNQPLNPAPSRDPHYQDPHSTAVGNPEYLNTVQPTCVNSTFDSPAHWAQKGSHQISLDNPDYQQDFFPKEAKPNGIFKGSTAENAEYLRVAPQSSEFIGA

SEQ ID NO: 126 - protein, 1255 aa, Homo sapiens
MELAALCRWGLLLALLPPGAASTQVCTGTDMKLRLPASPETHLDMLRHLYQGCQVVQGNLELTYLPTNASLSFLQDIQEVQGYVLIAHNQVRQVPLQRLRIVRGTQLFEDNYALAVLDNGDPLNNTTPVTGASPGGLRELQLRSLTEILKGGVLIQRNPQLCYQDTILWKDIFHKNNQLALTLIDTNRSRACHPCSPMCKGSRCWGESSEDCQSLTRTVCAGGCARCKGPLPTDCCHEQCAAGCTGPKHSDCLACLHFNHSGICELHCPALVTYNTDTFESMPNPEGRYTFGASCVTACPYNYLSTDVGSCTLVCPLHNQEVTAEDGTQRCEKCSKPCARVCYGLGMEHLREVRAVTSANIQEFAGCKKIFGSLAFLPESFDGDPASNTAPLQPEQLQVFETLEEITGYLYISAWPDSLPDLSVFQNLQVIRGRILHNGAYSLTLQGLGISWLGLRSLRELGSGLALIHHNTHLCFVHTVPWDQLFRNPHQALLHTANRPEDECVGEGLACHQLCARGHCWGPGPTQCVNCSQFLRGQECVEECRVLQGLPREYVNARHCLPCHPECQPQNGSVTCFGPEADQCVACAHYKDPPFCVARCPSGVKPDLSYMPIWKFPDEEGACQPCPINCTHSCVDLDDKGCPAEQRASPLTSIVSAVVGILLVVVLGVVFGILIKRRQQKIRKYTMRRLLQETELVEPLTPSGAMPNQAQMRILKETELRKVKVLGSGAFGTVYKGIWIPDGENVKIPVAIKVLRENTSPKANKEILDEAYVMAGVGSPYVSRLLGICLTSTVQLVTQLMPYGCLLDHVRENRGRLGSQDLLNWCMQIAKGMSYLEDVRLVHRDLAARNVLVKSPNHVKITDFGLARLLDIDETEYHADGGKVPIKWMALESILRRRFTHQSDVWSYGVTVWELMTFGAKPYDGIPAREIPDLLEKGERLPQPPICTIDVYMIMVKCWMIDSECRPRFRELVSEFSRMARDPQRFVVIQNEDLGPASPLDSTFYRSLLEDDDMGDLVDAEEYLVPQQGFFCPDPAPGAGGMVHHRHRSSSTRSGGGDLTLGLEPSEEEAPRSPLAPSEGAGSDVFDGDLGMGAAKGLQSLPTHDPSPLQRYSEDPTVPLPSETDGYVAPLTCSPQPEYVNQPDVRPQPPSPREGPLPAARPAGATLERAKTLSPGKNGVVKDVFAFGGAVENPEYLTPQGGAAPQPHPPPAFSPAFDNLYYWDQDPPERGAPPSTFKGTPTAENPEYLGLDVPV

SEQ ID NO: 127 - protein, 190 aa, Homo sapiens
MTTASTSQVRQNYHQDSEAAINRQINLELYASYVYLSMSYYFDRDDVALKNFAKYFLHQSHEEREHAEKLMKLQNQRGGRIFLQDIKKPDCDDWESGLNAMECALHLEKNVNQSLLELHKLATDKNDPHLCDFIETHYLNEQVKAIKELGDHVTNLRKMGAPESGLAEYLFDKHTWETVIMKAKPRANFP

SEQ ID NO: 128 - protein, 175 aa, Homo sapiens
MSSQIRQNYSTDVEAAVNSLVNLYLQASYTYLSLGFYFDRDDVALEGVSHFFRELAEEKREGYERLLKMQNQRGGRALFQDIKKPAEDEWGKTPDAMKAAMALEKKLNQALLDLHALGSARTDPHLCDFLETHFLDEEVKLIKKMGDHLTNLHRLGGPEAGLGEYLFERLTLKHD

SEQ ID NO: 129 - protein, 535 aa, Homo sapiens
MLGPCMLLLLLLLGLRLQLSLGIILVEEENPDFWNREAAEALGAAKKLQPAQTAAKNLIIFLGDGMGVSTVTAARILKGQKKDKLGPEIPLAMDRFPYVALSKTYNVDKHVPDSGATATAYLCGVKGNFQTIGLSAAARFNQCNTTRGNEVISVMNRAKKAGKSVGVVTTTRVQHASPAGTYAHTVNRNWYSDADVPASARQEGCQDIATQLISNMDIDVILGGGRKYMFRMGTPDPEYPDDYSQGGTRLDGKNLVQEWLAKRQGARYVWNRTELMQASLDPSVAHLMGLFEPGDMKYEIHRDSTLDPSLMEMTEAALRLLSRNPRGFFLFVEGGRIDHGHHESRAYRALTETIMFDDAIERAGQLTSEEDTLSLVTADHSHVFSFGGYPLRGSSIFGLAPGKARDRKAYTVLLYGNGPGYVLKDGARPDVTESESGSPEYRQQSAVPLDEETHAGEDVAVFARGPQAHLVHGVQEQTFIAHVMAFAACLEPYTACDLAPPAGTTDAAHPGRSVVPALLPLLAGTLLLLETATAP

SEQ ID NO: 130 - protein, 461 aa, Homo sapiens
MNNFGNEEFDCHFLDEGFTAKDILDQKINEVSSSDDKDAFYVADLGDILKKHLRWLKALPRVTPFYAVKCNDSKAIVKTLAATGTGFDCASKTEIQLVQSLGVPPERIIYANPCKQVSQIKYAANNGVQMMTFDSEVELMKVARAHPKAKLVLRIATDDSKAVCRLSVKFGATLRTSRLLLERAKELNIDVVGVSFHVGSGCTDPETFVQAISDARCVFDMGAEVGFSMYLLDIGGGFPGSEDVKLKFEEITGVINPALDKYFPSDSGVRIIAEPGRYYVASAFTLAVNIIAKKIVLKEQTGSDDEDESSEQTFMYYVNDGVYGSFNCILYDHAHVKPLLQKRPKPDEKYYSSSIWGPTCDGLDRIVERCDLPEMHVGDWMLFENMGAYTVAAASTFNGFQRPTIYYVMSGPAWQLMQQFQNPDFPPEVEEQDASTLPVSCAWESGMKRHRAACASASINV

SEQ ID NO: 131 - protein, 1148 aa, Homo sapiens
MPLFKNTSVSSLYSGCRLTLLRPEKDGAATRVDAVCTHRPDPKSPGLDRERLYWKLSQLTHGITELGPYTLDRHSLYVNGFTHQSSMTTTRTPDTSTMHLATSRTPASLSGPTTASPLLVLFTINFTITNLRYEENMHHPGSRKFNTTERVLQGLLRPVFKNTSVGPLYSGCRLTLLRPKKDGAATKVDAICTYRPDPKSPGLDREQLYWELSQLTHSITELGPYTLDRDSLYVNGFTQRSSVPTTSIPGTPTVDLGTSGTPVSKPGPSAASPLLVLFTLNFTITNLRYEENMQHPGSRKFNTTERVLQGLLRSLFKSTSVGPLYSGCRLTLLRPEKDGTATGVDAICTHHPDPKSPRLDREQLYWELSQLTHNITELGHYALDNDSLFVNGFTHRSSVSTTSTPGTPTVYLGASKTPASIFGPSAASHLLILFTLNFTITNLRYEENMWPGSRKFNTTERVLQGLLRPLFKNTSVGPLYSGSRLTLLRPEKDGEATGVDAICTHRPDPTGPGLDREQLYLELSQLTHSITELGPYTLDRDSLYVNGFTHRSSVPTTSTGVVSEEPFTLNFTINNLRYMADMGQPGSLKFNITDNVMKHLLSPLFQRSSLGARYTGCRVIALRSVKNGAETRVDLLCTYLQPLSGPGLPIKQVFHELSQQTHGITRLGPYSLDKDSLYLNGYNEPGLDEPPTTPKPATTFLPPLSEATTAMGYHLKTLTLNFTISNLQYSPDMGKGSATFNSTEGVLQHLLRPLFQKSSMGPFYLGCQLISLRPEKDGAATGVDTTCTYHPDPVGPGLDIQQLYWELSQLTHGVTQLGFYVLDRDSLFINGYAPQNLSIRGEYQINFHIVNWNLSNPDPTSSEYITLLRDIQDKVTTLYKGSQLHDTFRFCLVTNLTMDSVLVTVKALFSSNLDPSLVEQVFLDKTLNASFHWLGSTYQLVDIHVTEMESSVYQPTSSSSTQHFYPNFTITNLPYSQDKAQPGTTNYQRNKRNIEDALNQLFRNSSIKSYFSDCQVSTFRSVPNRHHTGVDSLCNFSPLARRVDRVAIYEEFLRMTRNGTQLQNFTLDRSSVLVDGYSPNRNEPLTGNSDLPFWAVIFIGLAGLLGLITCLICGVLVTTRRRKKEGEYNVQQQCPGYYQSHLDLEDLQ

SEQ ID NO: 132 - protein, 526 aa, Homo sapiens
MGHLSAPLHRVRVPWQGLLLTASLLTFWNPPTTAQLTTESMPFNVAEGKEVLLLVHNLPQQLFGYSWYKGERVDGNRQIVGYAIGTQQATPGPANSGRETIYPNASLLIQNVTQNDTGFYTLQVIKSDLVNEEATGQFHVYPELPKPSISSNNSNPVEDKDAVAFTCEPETQDTTYLWWINNQSLPVSPRLQLSNGNRTLTLLSVTRNDTGPYECEIQNPVSANRSDPVTLNVTYGPDTPTISPSDTYYRPGANLSLSCYAASNPPAQYSWLINGTFQQSTQELFIPNITVNNSGSYTCHANNSVTGCNRTTVKTIIVTELSPVVAKPQIKASKTTVTGDKDSVNLTCSTNDTGISIRWFFKNQSLPSSERMKLSQGNTTLSINPVKREDAGTYWCEVFNPISKNQSDPIMLNVNYNALPQENGLSPGAIAGIVIGVVALVALIAVALACFLHFGKTGRASDQRDLTEHKPSVSNHTQDHSNDPPNKMNEVTYSTLNFEAQQPTQPTSASPSLTATEIIYSEVKKQ

SEQ ID NO: 133 - protein, 212 aa, Homo sapiens
MGPPSAPPHRECIPWQGLLLTASLLNFWNPPTTAKLTIESMPLSVAEGKEVLLLVHNLPQHLFGYSWYKGERVDGNSLIVGYVIGTQQATPGAAYSGRETIYTNASLLIQNVTQNDIGFYTLQVIKSDLVNEEATGQFHVYQENAPGLPVGAVAGIVTGVLVGVALVAALVCFLLLAKTGRPWSLPQLCLLDVPSLHCLGPPTQPQDSSFHL

SEQ ID NO: 134 - protein, 244 aa, Homo sapiens
MGPPSAAPRGGHRPWQGLLITASLLTFWDPPTTVQFTIEALPSSAAEGKDVLLLACNISETIQAYYWHKGKTAEGSPLIAGYITDIQANIPGAAYSGREQVYPNGSLLFQNITLEDAGSYTLRTINASYDSDQATGQLHVHQNNVPGLPVGAVAGIVTGVLVGVALVAALVCFLLLSRTGRASIQRDLREQPPPASTPGHGPSHRSTFSAPLPSPRTATPIYVEFLYSDANIYCQIDHKADVVS

SEQ ID NO: 135 - protein, 344 aa, Homo sapiens
MGPPSAPPCRLHVPWKEVLLTASLLTFWNPPTTAKLTIESTPFNVAEGKEVLLLAHNLPQNRIGYSWYKGERVDGNSLIVGYVIGTQQATPGPAYSGRETIYPNASLLIQNVTQNDTGFYTLQVIKSDLVNEEATGQFHVYPELPKPSISSNNSNPVEDKDAVAFTCEPEVQNTTYLWWVNGQSLPVSPRLQLSNGNMTLTLLSVKRNDAGSYECEIQNPASANRSDPVTLNVLYGPDVPTISPSKANYRPGENLNLSCHAASNPPAQYSWFINGTFQQSTQELFIPNITVNNSGSYMCQAHNSATGLNRTTVTMITVSGSAPVLSAVATVGITIGVLARVALI

SEQ ID NO: 136 - protein, 265 aa, Homo sapiens
MGSPSACPYRVCIPWQGLLLTASLLTFWNLPNSAQTNIDVVPFNVAEGKEVLLVVHNESQNLYGYNWYKGERVHANYRIIGYVKNISQENAPGPAHNGRETIYPNGTLLIQNVTHNDAGFYTLHVIKENLVNEEVTRQFYVFSEPPKPSITSNNFNPVENKDIVVLTCQPETQNTTYLWWVNNQSLLVSPRLLLSTDNRTLVLLSATKNDIGPYECEIQNPVGASRSDPVTLNVRYESVQASSPDLSAGTAVSIMIGVLAGMALI

SEQ ID NO: 137 - protein, 349 aa, Homo sapiens
MGPISAPSCRWRIPWQGLLLTASLFTFWNPPTTAQLTIEAVPSNAAEGKEVLLLVHNLPQDPRGYNWYKGETVDANRRIIGYVISNQQITPGPAYSNRETIYPNASLLMRNVTRNDTGSYTLQVIKLNLMSEEVTGQFSVHPETPKPSISSNNSNPVEDKDAVAFTCEPETQNTTYLWWVNGQSLPVSPRLQLSNGNRTLTLLSVTRNDVGPYECEIQNPASANFSDPVTLNVLYGPDAPTISPSDTYYHAGVNLNLSCHAASNPPSQYSWSVNGTFQQYTQKLFIPNITTKNSGSYACHTTNSATGRNRTTVRMITVSDALVQGSSPGLSARATVSIMIGVLARVALI

SEQ ID NO: 138 - protein, 459 aa, Homo sapiens
MAPLCPSPWLPLLIPAPAPGLTVQLLLSLLLLMPVHPQRLPRMQEDSPLGGGSSGEDDPLGEEDLPSEEDSPREEDPPGEEDLPGEEDLPGEEDLPEVKPKSEEEGSLKLEDLPTVEAPGDPQEPQNNAHRDKEGDDQSHWRYGGDPPWPRVSPACAGRFQSPVDIRPQLAAFCPALRPLELLGFQLPPLPELRLRNNGHSVQLTLPPGLEMALGPGREYRALQLHLHWGAAGRPGSEHTVEGHRFPAEIHVVHLSTAFARVDEALGRPGGLAVLAAFLEEGPEENSAYEQLLSRLEEIAEEGSETQVPGLDISALLPSDFSRYFQYEGSLTTPPCAQGVIWTVFNQTVMLSAKQLHTLSDTLWGPGDSRLQLNFRATQPLNGRVIEASFPAGVDSSPRAAEPVQLNSCLAAGDILALVFGLLFAVTSVAFLVQMRRQHRRGTKGGVSYRPAEVAETGA
